United States Patent Application Publication US 2014/0141044 A1 - sequence listing, part 2

SEQ ID NO: 11 - DNA, 181083 bp, Bradyrhizobium enterica
tgcgcgacatcgggccggcaatgcaaggcgtcggcagtgacaagagcgccgtccagatcgagcgaggcgaggacttcgagaacgccggcaacctcgttgcgattgggggccttcctttgagccagcgccatgcgtgtgcctgccgcccagacattgaccatatgcagcggtgtggattgccgcccacgcatgaaggcgccgcgcaacgccttgccgtcgatgctgaccacgcccttgatgccgaagcccttgctgagcttgcgcaaaatcgcttccaaccccttcgggtccagagcacggaagacgttgctgaacgtatcgtggctggggatgccggatctgagctccaggaaccgctgcaacagctcctctcggcctttgccgaagaactcgaactcggtgcaggtcttggcgccggccagtgtcgccgccaaggcgatgacgatgatctccaccagatcgtgccgcacgttgctggcgcgggggtccttgagtggtcgaagcaggcgcttgagttggcgcattctggtctccctcgggaagcgagagacacccaaagaatccagttccaaccgcttggcaacacccctccatcgccatatgcgattcccctacccttgcgggggagggcagggagaggggtgagccacaagctccgctccctaatactccgccgcaaaaaagctgcgcaatcgccggaacaaattccgactttgacgattagcaacctttggtgccgccaaagaccgccgggtggcgtcgtcgttaatgttgccgaccggctcctgttgcgtaccgatgatcgctattccatattcctttgcggccggccgtcatcacaccctgatttgtcgccgcccccgcagaagccagatgcctaccgtcccctttcgccaccccctgattgccgagtaagcgtgtggttcgactgggcttcatcgttgcattgattgctctgatcggagttctgctctccggtcttgccgcctatcgagtgcacgatcaggagctcgcgatcgacggtatcgcgctggcgcgggcgatcgacgtccatgccagcctggtgcaggaccgcctgaccgagcgcgagctgctggcgcgggtggcctcggggctgttccggacgccgtcgatggtgaaggccaacatgctgcagccgctgcgctcggcgatctatgccttcaagaccgatttcgtcttcgcggcctggatcgctcgtctcaggccgaatgagcttgccgcggcggaggccgagctgaaggccaacggcttcaccaatccgacgatccgggatttcgacgaccaggcgctcgacctcaaggcgctcgacaagccgatcaacgtgctgatggacgtcgagccgcgcaatccggagaccttgagcatcccggggcgcgccttcgatcgtcactcggtggtcggtccgatgctggcgcgggcgatggcgagcggcaagccggtggcctcggacccggtgccgctgctccggctgaacggcccggtcggggtcgtgctcgccgcgccggtgttcccggagggcgcctccgagcccgccggcttcatcaccttctcgtatgaattgtcggcgctgatgctgaccaacgacgattcctcgctgttcgcggtagccttaaaggacccgcgcgattccaacgacgagttcaccgccaacgagcagggcttcgtcacctcgcgcgcggtgcgccaggacggcccgatgccgtcgatggtccgcacggtgacgttcggcggccgcgactggtcgctcgactattacgccaagagcaatgccacggtgcgcgcgcagcagaccgcgaccatcgtcgcggcgatcgggctcgcgctgaccgggatcgtctgcggcctgttcggttatgtcgcctacaacaatctgcgcctcagccgcgagatcgaggtccggatcggcttcgagcgccggctgaccgccgtgatcgacgagctcaaccaccgggtcaagaacatcctcgcggtgatccagtcgatcgtcacccgcacgctgcggcacggcgccgacatcgacgtcgcgcgcgagctgctgatcgggcgcatccacgcgatgtcgaatgtcgtcacgttgctcagcgagagccagtggcagggcgtcaagctgaagggcctgttcgaatcgcgcgcgatcccgcatgccgaccggatcgcggtgaacggtcccgacatcaccgtcagcgcccgtgccgcgcaatcgctgtcgctgctgttcttcgagctcgcctcgcactccgacgaagggttgtcgctggtcggcaagcacccgcatatcgtcgccaattgggaagtcacgggcgaggatgccgacgcggtcttccatttccgctgggaggagttcaacaccagccaggcgacgcggcgggccgacagcgacttcggcctgatcctgctcgaccgtgtcgcgcccgaggcgctcggcggcaccgcgaagcgctacttcaccgacgtctcctatgtctacgagctcaccgcgccgatggacacggtcgtcgacatgaccgagcgcgaccgcaccgagcagttctcggccccggttcgtccggggaagaaatagagccgctgcagccgctccaggttgtgtcgctcgcgtgctgcccggattgatcgaaatcaggcgcacgggacgacgctgcttcatctgtgacgacgtcccgcatccgtatttgcccgcgaccgagtgttaaaacttcgttgaacatgcttgggcatataccgagcaggataccgtctgaggaccccgatgaggctttgggtcagcctgaccttgctcgcggcagttttgcccgtagggctgtcgcttgccttgaccccggcgacgacgccccgcgaccctgcggcaatccgcgccagctatcgccggccggacgtcgttcccttcccgagcagcaatccctattccgaggcgaaatccgcgctggggcagatgctgttcttcgatccgttgctgtcgcgatcaaagacgcattcctgcgcgagctgccacaagccgagcctgtcatgggccgacggccttccgcgcggcatcggcgaggatccgaaggggctgccgatccgttcgccgacgctgatcgacgtggctttcttcgagccgttgggctgggacggcaagttcaaggacctcgaatccgttgcattcgggccgatcctcagtccgatgaacctgaacatgaccgaggcggaattgatcgcgcgtctgtcggcgatcccgggctacgtcgacgctttcgcccacgcgttcggagacggcgcgatcacccggccgaggatcgagcagtcgctggcgaccttcgagcgctcgatcgttgccggcgaggcaccgttcgaccgctggatcaagggcgacgatggcgcgatcagcgcgtcggccaagcagggcttcgagctgttcaacggcaagggacgttgttcgtcctgccacagcggtccgtccttctcagacggatcgttccaggatatcggcactgcgaggggccatgacatcgggcgcggccatttctttccgacgtcggtgaagctgaaatatgcgttcaagaccccgacactgcgcgacgtcgcgcgccgcgcgccctatatgcacgacggatcggtcgcaacgctggaagatgtcatcgagctgtacaacaagggcgggatcgagcggccgagccggtcgcccgacatcaagccgttgtctctgacggcaggcgagaagaaggacctgatcgccttcctgcagaccctgaccgcaacggccccaccggtggcggggatccccaaactgccgcgctgagcactgcagagggcataggaggcggctcgtcaggcgaggtgcggcagtgcggccccaagcaggccgagccctgcgatcagcagcgcgcccgcgcaggtctccagcgtcgccgcgcgcgcagcggacggctttgtcagataggcgagggccgaccccaccccgatactcacggcactcaaaacaccgaacatttaaccggcctcccgatccgatttgttcgggtttcactacgacagttgaattgagctcccgtgccggaattagctaaaattcgatggaaccggccggaaaacactgcacttgggacgggtcgggacttgcctgccgcaattaaccacaatgcaaccagcggatgtcacgggcaggcgcaaagcgtaaaatttgatataagttaaacaagtccttaagtgtgcatgtgtgggcggtcggttcgatgtttagtgggcaggagcgtgatgccggctcggctgtgcgctcctatttcgccacgtgccttgcagcggtcttgttttgcgtgacagccgcgcgcagtgccgaggcacatgtcaaatggttctgcgcctacgatgtcgccgggcagccccggggactcgagaacgtcctttgcctcgactttgaactgctgctcggcgtcgccgtcttctggttgtttgcgggctgcctgatcgagcccacgtcggtgggggatgcgacgatccgggtgctcgaccgcgtcaccgaggcattgcggtcgcgcaccgagttgatgatgcgcgcggtctgcgccttctttttcatctcgatctgggccgtgggcggaatcctgctgacccccgaattgaagacgacgtcgcctttcgtgggcgcgctgcagctcggcatcgccgccggcatgctgtcgcggcgcacgctgccgctgtcggcggtcggcatggcgatcctgttcgggatcggtgtccgcgactacggcatcttccatctcgccgattacccgatttttctcggcgtcgccgcctattttgcgctcatcgggctgaacaaggacctgttcggcatccggccgatcgacgtgatgcggtacgctgcggcggtgacgttgatgtgggcctcggtcgagaaatgggcctatccggagtggagcttcccgctcctgatcgaacacgccgggatggccctcggcttcgacaacgagttctacatgcgcgccgccggcatggtggaattcgcgctggcctttgccctgatctggacgccgctgatccggcgttgcgctgcgaccgtgctggcggggatgttcatcagcgcatgcttcgaattcggcaagatcgacacgatcggacactcggcgatcatcgccgtgctgtttgcgatcatcgccgacaacaaggtgctgccgcgcgatcgtcgcgcgccatggcttgccccggtcgcgctttgcgccgcgctgtcactgacgttgttcgtctactatttcggccatgccgcgatcttcaagacctcgatcctgtagatcgacaccgcccgatggggctatttggcgacgtggacggccagcttcatcttcggatgaatgccgcacagcacggtgtagtcgccgggcacggagaaggtgacgtcgaatttgctgcccggctgctgatcgcccgagtcgaaactgaacgtatcgctgctcaaataagcgtgatgcagcagctcgccgtcatcgttaatgaatcgtaaaatctcgccgcgtttgatcgagatctcggcgggcttgaattcacgatccttctgcgagatgacatagggccctgcgcccaaagctgctccggccagcgctccggtgacgatcgctgccgcaaatggcgcgcggccgaaccggcccaggcgcaaggcgcgcaacaagcccaactgcatgaaacccccgcttgaacctcgaacacccgacatcggctactccagggtgcatgtggtgcctcccggatttacctatgaccgtgattatcgccagccgatcttaacgatttcagcatcagttccggtcactactaaggcaattttgatcagacaattatacttccgcagcgctgcgcgtttctgcgtagcttgaacatcgagcactacggcgaaacgcgggtatggacagcctattaggcaacctcaaggtgaagagcgctgcggcctttcggttcgcaaccggccgcctgtcgcgccttgcgctgaccaagggttcgatccgcgcccagattctgattttttgcctcgcgatgagcgctgttgccgtcgcgctcggcggatactccatcctggggatccgccacgccggcgatctggtggccaagacgttcgatgaatccctgatgtcgatcaattacgcccgtgccgccggtgcggacttcgcctcgatgcgggtcgcctcgtcacagcgcctgctgaccacggatccggatatccgtgccggcctcgacagccagatcgagaaactcgcgaagacgctctccgaggatctgacgatcgcggccgaccggtcgcagtcctcgcgggctgcgcaagccgccgcaaaggtccaggaagctgccgacgcctggatggcgctgcatcgccgcgcgatcgcatcgtcggtggagggaaattcggccgtcgatccgcatgcatcgggcaccacggtcggcgacgtcgatcgctactccaggatcgtcagccagcaggtcgagctgctggtgaactataccgccggcgacggctttctgttccggcagaaggcgctctcgacgatcaagcgggacctgcagctcaacgtcgccgggctgacggtcgcgctgttcctgtcggcgctgttctcgtggttgttggcccgccgcatcatcggtcctgtcgccattgcatcgcgggccgctcgcagcatcgccggcggcgacctcgatgcgaccgtccccaagggcggtaccgacgaactgggtacgctgctgaccgccatggaaaccatgcgcgacaacatcaggcggatggtcgatcgggaggtgtcgcaacgccgctccgcgcaggcgcggctttccgacgcgcttgaaacgtcgccggaaggcgtcgtgctgctcgatgcggatggccagatcgcgctggccaattcgcgggcgagcgaattcatccgcctctcgccgcagcttctgcaatcggatcggctcgatgccccgagcctggcgccggccgacggtgacaacgatggttttgcgagcgaagcgcggctgtcggacggacgctggctgcgtgtcagccgcagcgagacgcaggagggcggcgtcgtcctggtctacagcgatatctccacgttgaagcagcagaaggcggagctgcacgagaccaatctgcggctcgatgcggcgctcacgcacatgtcgcaggggctgtgcctctacaacagcgaggcgcggctgcaggtcgccaatcgccggttctgcgaaatcttcgatatttcgccggagctcgtcgtccccgggatgaccatggaggacgtgctcgggctcagcgtcgccgcgggcaatcatgcggaccgaaccgtcgccgacctgttggcggagcgcgagcgctcgatggcccagcacgacggcaactatctgcagcatcttgccgatgggcggatcatcgccatcgcgcagcggccgacaaccgacggcggctggctcgtcacctgcgaggatgtcaccgaacagcagcgggccgagtcgcagatcgcgttcatggcgcggcacgatgccctgaccaagctgccgaaccgcacgctgctggccgaacggatcgagctggcggtcgcgcaggtcggccgcggatccggcttcgcggtgttctgcctcgatctcgacaatttcaaacaggtcaacgacacgctcgggcacccggtcggcgacgaactgctctgtgcggtcgcggaccggctcaacgcctgcgtccgcgaggtcgataccgttgcccgtttgggcggcgacgagttcgcggtcattcagtgtggcgtgcagggcggcgaggaggccgaacgcctggcccgccgcatcgtggaatgcgtcggcgccccctatgagctgaacgggcatcgcgtcgtggtcggctgcagcgtcggcatctcgatgtcgccgggcgacggcaccaccggcgagaagctgctgaagaatgccgacgtcgccctgtaccgcgccaagatggaaggccgcggcacctggcgcttcttcgagcctgcgatggacgccagcctgcagcggcgtagggcgatcgagctcgaccttcgcgaggcgatgctcaaggacgagttctcgctgttctaccagccgctctacgatctccatctcgaccgcatctgcggcttcgaggcgctgctgcgctggcatcatccgaagcgcggattggtgccgccggaccagttcattccgatcgcggaggagatcggcctgatcggtccactgggcgaatgggtgctcggccgcgcttgcgaacaggccgtcacctggccgagcgagatgaagctcgcggtcaacgtctccgcggtgcagtttcgcgatcccgacttcaccgacgtcgtcgtcaacgcgctcgcggcgtcgaaattgtcgccgcgccggctggagctcgaaatcaccgagtcggtgttcctcgtcaacagcagcgagacgcttgcaacgctgcacaagctgaaagcccagggcgtgcgcattgcgctcgacgatttcggcaccggttactcgtcgctgagctatctgcgcagcttcccgttcgacaagctcaagatcgacaaatccttcgtgcgcgacgcgaccgcgacgcatggatcgaaatcgatcgtgcgcgcggtcatcagcctgggcaggagcctcggcatgaccacgatcgccgaaggcatcgagaccgtcgagcagctcgaccacatgcgggccgagggctgcaacgaggcccagggcttcctgttcagccatccggtcccggtgaccgagatcgcggccaagatcctcgaactgaggagcggcttcaagccggccgcggtcaagaaggcgatggcgagctaggttcccgtatcccttgcaaaacaaaaggcggcccgatcgggccgcctttccgtttcagcatcgcgctcttttatccgccattgccgccgatcacggcgcgcacggtgttgtcgggaccgaaatcctcggcgctgtcgacatagagcagcgcggagagcttcgagcgcgcgcggttgacgcggctcttgatagtgccgaccgcgcagccgcagatcgccgcggcatcctcgtaggagaagccggatgcgcccaccaggatcaacgcttcgcgctggtcctgcggcagcttttccagcgccgcgcggaattcctcgaactccagatgcgcggcctgcgacggctggctcttcagcgtcttggcatagttgccctcggcatcctcgacttcgcggcgccgtttgcggtagtcggagcgaaacaggttgcgcaggatggtgaacaaccacgcgggaaggttggagccgggctggaacgagtcgatgttggcgatcgcgcgcagcagcgtctcctgcaccagatcgtcggcgcggtcaccattaccggatagcgagatcgcgaacgcgcgcaggctcgggaccgacgccaggatgtcgtcgcgaagttcattcgtgagaggcattagtcccctccattgttcttgtcgggatcgcccccggccacggccgcagcggcagcctcgggtccgtcgagtttgcggatcagctccgcaaagcggtcgggcaccccctgccgcaccacgtcgtcgtacatggcgcgcagctggtggccgattctcgactgaatctcggcgttgagaccgccctgcttctttacttccttcatgatctgatccacgcttccccgggagttaagtctctgatttccaagatgtttcctcgaagaaagaggctggccgcgttgcctcgtcggtcaggagctaatgcgaagttgcgcagaaagttccggaaggctggaactatttcgtggaacttttccggctttcgcgcgtagtcgggcatgcaggggaaccggggtcgccccggaaaatggattctcggagctgggttctgtcgtccccagacaacgggtttcgggccgccaggcccaacgacccaggcttaagaacaaggatggagtgggaatgtcccgatcgcagatcgttgccgaacaccttccgctgctgcgccgttacgcacgcgcgctgaccggaaaccaggcgtcgggggacgcctatgtcggggccatgctcgaggccctgctgcaggatggatcattgctggaccaggcgcatggcccgcgcgccggcctgtttcggctgttcacccagatctggaattcggtgtcggtgaacaacaacgacaatgaagacgtggcgacgctgtctctgccgccggagcgccggctttccaacatcacgccgctgccgcggcaggccttcctgctgctgtcgctggaaggcttttcggaggaggaggtcggctacattctcggcaccgatatcgccgagacgcgcaagctgaccgatgccgccggccgcgagatggccgccgagatcgccaccgatgtcctgatcatcgaggacgagacgttcatcgcgatggatctcgagagtctggtgaagaatctcggccacaacgttatcggcgtcgcgcgcacccactccgacgcggtggcgctcgccacgaacaagaagcccggcctgatcctcgccgacatccagctcgccgacggctcgtcgggcctcgatgcggtgaacgagctgctgcgcaccttcgaggtgccggtggtgttcatcacggcctatccggagcgcttcctgaccggcgaacggccggagccggcattcctgatctcgaaaccgttccagccggcgatggtgtcggcggtggcgagccaggcgctgttcttccagcgcaactcgcgcaaccgcacgccgcgtgcggcgtcggcatgacctgaaattacgcaagaggcaaaatccagccggcgtaccgaaaggtacgccggttttttcgtttgggtcgttcaacccgggcgggtgcgcctcccctgttgcggaacagagatcatcgacacgagtttgcttcttattgcctgggcttggcggagtcattgtgtcgatattgcaaaccccgatagctgatcgtggtgaactcaccgaacgcctcttcatcggccgcagcgagcttgcgggactcatcaagaatctggattgggcaagcacatcgttaggctcgcccgaggcgtggccggacagcctgaagactgccgtgcgcatcatgctcacatcgcagcagccgatctggatcggctggggtgacgatctgacgttcctctacaacgatccctacaaatcgatcatcggcggcaagcatccgcgcgcgctcggcgagccgacccgcgtggtctggcacgagatctgggacgacatcgcgccgctcctcaccaaggcgatgagcgggagcgagggcacctatgtcgaggcccagctgctgatcatggagcgcaacggcttccctgaagagacctactacacgttttcctacagcccgattcccgatgccgacggtctgcccgccggaattttctgtgccaatacggacgatacgcagcgtgtcattagcgagcgccagcttttgcttctgcgcgagcttgccagccgtgcggccgaggcgcgaaacgtcggcgaggcctgcgagcgcagcgccgaggcccttgcgaccgatccacaggatttgccctttgcgatgatctatctgatcgatccagaggagcaggttgcgcggctggccgcaaccagcggcatcgaccggcatcatagcggggtaaagccgcagctggcgctcgacggcagcgaagtgtggccgatcgccgacgtgttggcgggccgcgacggagtgctggtgcagaacctgaaatctctgttcgatctcgatttcccttccggtggctggcgccaggcgccgcagcaggccgtcgtgcttccggtacttgccgccggcgatgcggtggcgggcgtcctgattgctgggctcaacccattccgcctcttcgacgaacgctatacgagctttctcggattggtatcgacgcagatcgccgccgtcatcagcaacgcccaggcctacgaggaggaacgccgccgcgctgaggcgctggccgaaatcgatcgcgccaagaccaccttcttctccaatgtcagccatgaattccgtaccccgttgaccttgatgctgagcccgctcgaggaattgctgtccggaggggagggccacctgctgcccgcgcagcgctcgttggcggaaatcgcgcaccgcaacggacaacgcctgttgaagctggtcaacactttgctcgactttgcgcggatcgaggcgggtcgcgccaccgccagcttcgagcccgtcgaccttgcggcgctgacgtcggatctcgcatctaacttccgctccgcggtcgagaaagcgggtctgcgccttgcgatcaggacgcaaccgctgcccgagccggtctatgtcgatcgcgacatgtgggaaaagatcgttctcaatctgctgtcgaacgcgttcaagttcacgttcgagggcgagatcgcggtcgtggtcaaggcctcgcccgatggcgctgaagtcacggtcagcgacaccgggaccggcatccccgcggcggcgctgtcgcatgtgttcgagcgctttcaccgtgtcgagagcgcacggggccgctccttcgagggcagcggcatcggtcttgcgctggtgcgggagctcgtgaagcagcatggcggccagataagggtcgagagcgagattgatcgcggcacctcgttcaccatcacgctcccgttcggaacggatcatcttcccgccgatcagatcaacgcgatcgcgccggccgaacggagcagcgtccgtgcccaggcctatctcgacgaggcgttcggatggctggaagggagcgagaccgacgatcggcccgatccgtcctcgcccgaggatctcggtttggccgcgcctgccgcctccgggccccgccaccgcattctgctcgcggacgacaatgccgacatgcgggaatatgtacgtcgtttgctggcgccgctctatgacgtcgaggcggtcgaagacggcaaggccgcgctggaggcggtatggcggcggcgccccgatctcgtcctgagcgacatcatgatgccgcggctcgacggcatcagtcttctcaatgcgcttcgcgctgatgcggacctcaaagggctgcccgtcatcttcctgtcggcgcgggcgggcgaagaggcgaaggtcgaaggcctgcagatcggcgccgatgactatctcgtcaagccgttcagcgcacgcgagctgctcgcgcgggttgccgccaatctcgaactgtcggccacacggtctgagcgcgcggtgcggcttgaagaggaggctcacgtgctcgagctcctgaacaaggttggcagcacagtcgccggcgagctcaatctggatcgggccgtccagatcgtcaccgatgccgcgaccgaattgaccggtgccgccttcggctcgtttttctacaatgtgatcaacgacaagggcgagagctacatgctctacaccctgtccggcgtaccgcgcgaggcgttctcgcggtttccgatgccgcgcaacacggcggtattcgcgccgaccttcaacggcgatgcgatcgtgcggtccgacgacatcctgaaggatccgcgctacggcaagaaccatccgcattacgggatgccgaaggggcatctgccggtgcggagctatctcgctgcgcccgtggtgtcgcggtccggcgaagtgctgggcggcctgttcttcggccaccctgagccgggtgtgttcggcgatcgtgcagagcggttgatcgccggtatcgccgcgcaggcggcgacagcgatcgacactgcgcggctattccaggccgccgagcgcgaggtcgccgagcgccgtcgcgccgaagccgcattgcagatcctcaacacgacgctggagcagcgcgtcttggaagaggtgcaggagcggaccaaggccgaagagcagctgcgtcagattcagaagatggaagccgtcggccagctgaccggcggcatcgcgcacgactttaacaacatgctggcggtgattatcgccggtctcaatctgatccagcgcaaactcgacaggggagaaaccgatgtcgagcgcttcgtgggagccgcgatcgacggcgcgcagcgcgccgcgggtctgacgcagcgcctgcttgcgttctcgcgtcaacagccgctcgcgccggtgacgctcgatggcaacaaaatgatttccggcatggccgacctgctggcccgcacgcttggcgagaccatcagtctcgaaaccgtgttggccgcgggcctgtggcgggtccgtgcggacccgggccagctcgaaaatgccgttctcaacctctgcgtcaacggccgggatgcgatgccggacggcggcaagctgacactcgagaccgccaacagctatgtcgatgaggttgcggcaaaggcatactcgattccgtcagggcaatatgtgatgatcgccgttgccgataacggcgtcggcatgagcgcagacgtcatcgccaaggcgtttgatccgttcttcaccaccaagggcgtcggcaagggaaccggcctcggcctcagccaggtctatggcttcgtgcgccagtcgggtggccacgtgaagatttattcggagattggcgtcggtaccaccgtcaagatatatctgccgcggcatcttggcgaagccggtccggagtttgtccggcgtgtgccgatggcctcatatcgcgggcggacgaacgaggtcatcctggtggtcgaggatgaggatcgcgtgcgcggcgtttcggtcgaggcgctgcgggaactcggctacaccgtggtcagcgcagccaatccccacgaagccctgaaacttctcgatggcgggctttcggtggcgttactgttcactgacgtggtgatgccgagcatgtccggtcgcgaactcgccgtgcaggcacgcgaccgcattccgggcctcaaggtgctttacaccacgggctacacccgcaacgcgatcatccataacggcattctcgatcccggcaccaatctgctgccgaaaccgttttcgatcgacgaactggcgaccaaagtccgcgaggtcctcgacggaatctaaagcatgatccggaaaagtgcgaagcggttttccgaaaagatcatgctcaaacaaagcgccaaaacgtgatgacgattcaaccaaatctcatcgcgctttagcgaccgatcggttcgaagctacttgcgcgtgacgcggaccggcatcgtgctgagcgcccgcaggcccgagctgtcgcggaaggcgaccgggcctgcaatgtcgaactgcttcacgcggctggcgagtgctgcgatcacggcctccgcctccagccgcgccaccatctgtccgacgcagccgtggatgccgacgccgaagcccatgtgcccggacagccgccgcctgacgtcgaactggtcggcatgctcccagcgcgtctcgtcgcggttggcggaggcgagcagcagcagcaccttctcgtgcttgccgatcacaacgcccgcgatctcggtctcgtgcggcgtggtgcggaacacgaacggcgccggcgaatcgaaccgcaatgtctcgtcgaacgccgcgcgcgacagcgacgggtcggcggcgagcaacgcccattgttcgggatgccgcgccagcgtgtacagcgccatgccgatcgcgctgatcgtggtgtcgagcccggccgagagcagcgagcgcaccagcagcggtgcttcctcggcgctgatctcgccggtgtcggccgcctcgaagacctgcgcgccgaagctgcccggccgcagcgcctcgcgctggcagcgcgcagcgacccagggcagcacgcgcggcgcctgctgcatcagctcgcgaaaatagtcgttttccggcccgaagccggcgaacaccatcgcgccataggtcaggaagttctcgcggccctcctggtcgatgccgagcgcgtcgggaaacacgctgaccggaaacacctccgcgatgtccttgatggcgtcgaacgatccgcgctcgaccagcccgtcgacgagcattgcggcctttgccttgaaatcatcggcgagccgccgcatcgcaccgggcgacaggatccgcgccagcaccgcacgggtccttgtatgcagcggcggatcggcttccagcacgatgctcggcggccgccacggcttttccttgaagtgattcgcaagcccggcgccgccggcgttgctgaagttgagatggtctccgaagattgtcttgacctcggcaaagcgcggcacggcccagatgtcgtatctggtcaggcgaatgaccggcgctgcggcacgcagctcggcataggtgccgtagggatcggcccgcgtcgccgggctgaacggatcgaaatcactgcggatagtttcgccggcaaggggactcacagcggtgctcatcggatcctcccatcctgtgaccagttaattgaccgtagtcaattaactggagtatggcaagtgggcacgacctcgtttcgattccatcggaccggaaaaggctctaggagacggtaatgtcgatcgaggagcgacccagcaggggtgcgcggcgctttcagcgccgggcgcgccaggaggcggacaaggaggcgctgaaggcgctgatccttcagaccgcgcgcaaggagttcgccgccggcacgctcgagaccgtctcgatccagaagatcgccgacgcgatcggctattcgaagggcaccgtcctcaaatactacccgaccaagctgttgctgctgctcgcggtgaagcagcagaacctcgaggcggttgccgcagcgctcgagcgggtccgcgcgcagactgccgacagcgatctgcggctgcggcgggtgatggaaacctacctcgactactgggccgacaatcccgatcacttccgatcgctgttctcgatgtccggcacggtcgaggaccgccggtttcctgacggcgtctatttcggcgagacggagatcgcgcgccgtagctacgagctgttcgtggtctcggtgcgggaatttctcgccgcgcatggcgccgagccggggccgggcctgccgcaacggctggcgaccgcgctactcgcggcgacccatggcgtggtcgcgctgaccctcggcacgccgaccatgaagcttcccgacatgcgcggcaccggccgtctcctgatcgcgagcctgatcgatgcctggacggccagacttgccgtcgcgcggaaaagcgagggctggccgcggatctcgaccggcaccttcgcctgatggtggtattcgcgcgtgcatgcgtggtgtggtgtccctcgtcattccggggcgcgcaaagcgcgagcccggaatccatttcgccacagaacctgcagcctgatggattccgggctctcgcttcgctagccccggagtgacgaatggacgacgcgacgcacggcggcatacgcgaagcgaagtggaatcgcatggctcgccctgctaagcgcggcccatggacacgacgcaacgcgaccggacggtcggctttctttgcctggaggtgacggcgttcggctgggcgctgaactggccgctgatgaagctgctgctgcaacaatggccgcggctgttcgcccgcgagctcgccggcacttgcgcggcggcgatcctgggcacgctggcgctggtccgcggccagtcgctcgcggtgccgcgtgaggcgatcccgcggctgcttttcgcctccttcaccaacgtctttgcctggatgggcttcggcaccatcgcgatgaagttcgtcacggtcggcgagggcgcgctgcttgcgattgaacacgtcggggcacgcctggcagcataactattgacccggcgctttccagctcaggggtcttttctttggtgctttcaggaaatccctgcaaataattcgagcgcgattcacacatgtgatttctggaacaggcgcccatggccaatcatcccggtcactgggcagggctgtttcattaagatcaaaatacaagcccagaaggggccgccaattttcggcaagtggcggttcggcgtgagaatgggaatacgaaacggcctcagctagcgcctgctagctggggccgtttttcatctaggaacgagcgcggcgcgccgagttgttcttgcgtccgggtgctgcaccctgccgggcagtatcaggacgaccaaagtgcaactgcgcggcctcagcctgtgccccctcgctggggccgtttctttgggaggctcggagctattgcttcgtctcttgcgaggggctgactttgccgaagctttgatgaaatcaaagtggctgccgagcacgccaactagatcggaatgacgttaggttgaatcggtttggccacgaacacgattcacctctccccggcggggagaggtgaacttccgatgccgttccagctcaacctaatcccatcccgctctagtctagaaaggcacgcgggcgttttcgggaggccggtgtccggtcggtacggaggccgaaggaacggacatcggcacatcgcgttctcctgaaaagggagcttggccatgcgcaaggcgatcgcgcggcttgatgcggagcagaaggcgcagctgctttatctggcggacctcggcacggcgatgttcacgtccgcactcgtggtctgcaccctgaaagcggccgttgacctcttcgtcggcagctgaatgccgcctgtgaatgcgcgccgtcacgcgtcgcttggcgcatcctctccctgcgtgtggccgtcaggccctcgatcgaacaccccgtagtcgctggatttcactccggctgaaccgtcgacgccaacgccggccagaccgagcctgagcagctcgcggaccgctgcggcgcgggtcggcatgcgatgcttgaagcggaaatcatcgagggcagccaattcctcaggcgacaacatcacttgcagtcgctcggcgcgcaactcgttcatcgcaagatacccagacttagctgtttgagtaacttgctaaacgagcaaactttccgtgagttcccacgctttagacaaaagcatcaaattagcaaaattatcaagcaaaatcaatatcttatgtaaaaaattgggaacggtccggcggtctgcttcgttgtgttgcgggagtgatgccatgaccaacgacgtcaagctgccccgcaagctatccgaggagccgggagcgccggaaccgcggcgcccgagccacgctcggatcatcgatcaactcgaccgttgggccaatagccccggtctgcaaccgccaaggatggacgatggagaggatgattcaacgacggaagcgatctgagccccacacattcgagcagcgcctcgaggaacaccgcgtgcggctagaaaacttgctcgctcagttgccccccggcgccgagcgcgagcagatcattgcgcgcatcgatcaactgaagacggcggtggagctcaacgcgatgctctcgacgaccgcatagacggatcgcggccacgccgcgcggcgggccgctcagcatcctcggcagaccgaattcagctttgccttgagggcgggaccgtcccccagtgcgacggcatcgaaggtcatcggcaagataaactggaagtcttcgcccgccgtgtccgcagggaatggcgggcggggcgcgggcctggagcagacggttggaaaaatcctgtctccatgctgcggctgaaggggtgacttttggggctgcgctgctctcggcgagtgtgggagccgtggcagcaaagagcaaagcaatacaaatgaacgccggcgccggccactttgcatggggttgttttcgatatttcggcctgtgcgggtaccgttccaaaaagtgaagggccggaggtatcctctgccgccggaatccttggcgcgcgcggggccagccggtaggatggaacccggacgtggccagggaccaggggaagaccgtagaatgaagcatgtcgacgtcgcggtgattgctgccacgctgtggctgctggcgtcgatggtgctggacatcctgacgccgaagtcgatcaccgtgttcatgatcgcagccgcgctcgccccgccgttcctgatcgggatcgccatccatttcgcgcgcgaatatttcaaggccaagcggcgcagctaccagccgccgcaatgggacgaacgcttcaggaactaagcggggcagggctgcaagaagcgctgcgtcagccgcattgaactgcgtccatggcttgctaagcttgcgccatgaccgagcaactcaccgacacgatcagccgcctctacaccgaccccggcgaatatgtcgacagcgaccatcccgccgtcgaggcgttcgcccgcgccgccgttccacgcggggccagcacccgcgagatcgcgagccggctctacaccgcggtgcgcgacggcatccgctacaacccctatgtcagcatgcgttcgccggagagctatcgcgcctccagcgtgctcgccgccggcaacggctattgcgtcggcaaggcggcgctctatgcggcggcctgccgggtccacggcatcccggccctggtcggcttcgccgatgtccgcaaccatctcaccaccgagaagctgcgccagagcatgggctcggacctgttcacctggcatggcttcaccgaagtgttcgtcgacggcgcctggcgcaaggcgaccccgaccttcaacgacacgctgtgcgccaagctcggcgtcaagccgctcgacttcgacggccattccgacgcgctgctgcatcccttcgatggtgagggccgtgcctacatgcaatacgtcaacgatcacggcagctatcacgacgttcccgccaagttcctgatgcgcgagatggcgcgcgaatacgccaacatgcagggcgaggacatgtccggccgcgacatggagcgcgaggccgcggaacaataatagcgggcgcgggcctgcgcaccggctgagggggcggtgtcatggatgcggagctgccgaaagcgccggtcggccgcccggccaccggttgggacggcgcgatcgcactgatcggcttcatgctggtcgcggtcgcgcaggcctccaaccaggttctggcgcgcggccttgcaggctcggtgccgccgttctcgctggccttcttccgctggagcatcatcgcgatcgggctggcgccgttcgcggtcgcggcgatccgcgacggcaagatcccgctggcgcagaacctctggccgatcctcgccgccggcttcctcggcatgttcctgtgcggcggcccggtctacatcgcgggcatcaccaccaccgcgatccacatcgcgctgatcttcgcgctgtcgccgatcatggtgctgttgatttcggccgcgctcggcatcgagcatatcggtccgctgcaatggctcggcacggcgctggcgctcgccggcgcgctcttgatcgtctccggcggtcacctcgaaacgctgacgcaatcgagcgcggcctggggcgatctgctggtggtgggtgcgatgctcggctggtcgggctacacgctggtgcaatcgcgcgtcgcgccgcgcgcctcgctgctggcgcgggtcagcctgttctcggcggcgggcgcgctgtgctcgctgccgccggcgctgcaggagatgtgggcgacgccggctgcggtgttcaacgcgagggcgttcgaggcctatgtgttcgccggtctggtgcccggcctgatcgcctatgccggcttcgcctggctcggcgcccggttcggctcggtgcggacgtcgctggtgctgtacgtcgcgccgatcgcgagcgcgctgttgtcgtggatcatcctcggcgagccgccgaagccgatccatctggtcggcggcttgctgatcctcggcggtgtctgggccagcctgcgcaaataggccagctccccgccattgcaacttttcccggcctcgtgcgttgaatccagcgttgattcaagaacttagttggaggccgcatgaatctcactccccagcaacggaaagagcgtgatgcgcagcgtcagcaagaggcgtcgcaggcgatgaaggagcatcgcgccaacgagaaggccttctacgacaatttccagcgcctcaaggccgagcggcaggcgcgcgaagcggcgggatcagggacgtcggcgcagcccggttcgaaataacaccggcaaccgacctcatcatgcaatcaaagatgcaatcgcgcgacgtaccgcccaaaaaagagcagggcgcgaccggcatcaccacggtcgcgccctacgtcgccggtcaatggggcagggggaataaccggctcttgcaatgacgcgcagaccccggagtcgttccgcgccaatcgaaattttttcgtacacggttaagtgatggtcggacgcgagaaccgcacaggtttagttcgcgttgtgtccgtgatcgccgagggattgctgagcgaatttccatggggcgagggacatcaccatgtcaaagattcaaaagggaattttcgctgcgttggcggtcggactgacgctcggcgcggtccagctcgcatccggacacgatctcattggcagtcagcaggtcaccaccgcattggcgccggagagcgccgtcaatcgtgccgccaaaaccgaccgtgccgcggttccatcgagcaacctgccgagccggaccgttgcactgaagctcgaccggttgccggacacgtcggtgctggtccgcgtccccatggcgcgggaagaggcccgcaatcactccgcagcgcctgcccgggcccggcccggcgatacccgcaaggtcgcctgcgagccggtggtcagcgtcctgaccgaagtggccaagctgctgcagcccggccgctgcgtgacctgacgggcgaacgccaactcagcaggcaacactgtcatcgcccggcttgaccgggcgatccggtacgccgcggcagcagttgttgccaatgaccgccgcggcgtactggatcgcccggtcaagccgggcgatgacatggtgggtgcggcttgcaccttgccgggtacgcaggctattcttcctcttccgcctcagcaccactcgcggcactgcggcttgccatcaggccgagcgcgaggccgccgaccaccaggatcgggatcagtcgcttgacgccgacggcgcggacaatctgcagaccggtggcgatcaaggcgggatcggcgaacatggttgccgcggccgatttcgcggccttggccgccttctctgcgcgccgctgcatctcacgcttgtgcgccacgtacacggcaacgacgatcaaggtgacgaccaggaacagggcggcgccggcgaggcacgcctccaccggtccgtagtgctgcagcacatacacgaaggccgccgcacagaggaaggcgagggtgatgaacagcgcgatcgcggcggccgcggccagcgacgtcagccgcagcgcgctgccggtggattgcttgacgtcatcgatcagccgctgaagcattgaccagccttgtcttcgaccttgccgtgaaaagcgcatcgacaaacgaggcggcggcgcgccaccgctgccatctcgtccagaatggtggtttgcgcatgaccaccatcgggttgaatcggatctagcgccgccaggtgacgccgatcaaaaagccgatgccgagcgccaggccaacggtcgccagcggccgctgcgtgatcacctcttccagcgactcctcgatcgaggaggcagcttcctgcgctgcgcccatcatcgcgctgccgcgctccgacatgtcgtcgagcgcatcttccgcgttggcgcgcgcatccttgtagcggcggcgagcctgcttccccgcgttgttggcaaatgagttgagcgcgtcggtgatctgttcggtgagggctgcaatgtcgttcttcacggcggtgacatccttttccaggcgttcgtaggtcgctttgtcggtcatgttcttgatcccaaatacgctgtccgtgttcgacatcggaggctcccgcttcattcgcgtattgcgagaaaaacgccgcgcatcacgcaaagttccatatgcgaaactgtagcttcttgttcgtgcgccttattcacgcgaaccgctgcccacttcgcttgaaaacgctttgctatccttcgggcaactgcggcgaattgaccggcatcaaatgctccttgacgatcaatgccacgatcagcagcggcgacgacaggaaggcgcccatcgggccccacaaccaggtccagaacgcaagggcgagaaagacggcgagcgcattcagcgacagcctgcggccgacgatcgtcggtgtcacgaaatgcccttccatgaaggtcacgacggcaaagcaggccggtgcgatcagtccggcgccgatggccggcgcggagatgatgccgaccacgaccagcaccacgaacatcgcgaccgggccgatgatcgggatgaagttcagcgtcgcggcgagcgcgccgagcccggccggattgggcatgccggtcgccgcgcagatcgcgccggtgacgatgccgacgccgacattgatcatcgtcaccgtcagcagataattgccgagatgggtttcgagctcgttgaggatgcgcagcgtacgtagccgcgcttcgcgttcgctgaaggtcatcaccagcgcgcggcgcaggtccttccagctcgcgatgaacaggatcagggtggcgacgaacagcaggaattcggcgaaggtcggcgacaggaattccagcgtcggctgcacccattcgaatttcggcatctggaagctggccagcgtgtcggagccgccgaccatgctctgcaattcctgccacagcgcaagcggccggtcgaacacgtgcagcttctgcctcaggatcgcgccgagctcgggcagacgcgaactccattccatcactggtgaggcgatcaacccgaccatgaaggcaacggcagtgccgaccgcgatcacgatcagcacggcgccgagcgcgcgcgggatccggtagcgctcgagccggcctgccgccggcgacagcatggtcccgacaatgaaagccatggtgatcggaaggaagaaggcgcgcgccaaatagagcaccccaacgatgacaatgatcagcagggcgaccagcgcgaaggcgacgacctcggcgcggctgatcagcggcggcagttcagccttgctgtcggggaggggcgtgccttcgggggcgttgccaagcagacgttcacccggaaaggcgcgcaccagtttcctcccgcacgaggacacatgaatttcgtatcaaattgcgcgtgacaacgaccgcgcccggcagaagttccatcgcgggttcgtgagatacggcgggttgacaatcgcggcttcgcgacgattcggccggaactctgtggcggccacgcgcgttggcttggcatcgcatcaccacgatgcgcatcccgtccaggggcagcacatgacacagcagtctttctccagccgccggcttgcgtcgcgcgccgcgcgcacctttgctttcgccggcgtcctgttcgtgacgccattcattgtcaccacttcggccaacgcccaagcgctcggctatgcgtcgacgcagccgggcgcattcccgtccgaccaggcgatgaccgatccttcgaccgaggccaccgaggacggcgtgctgccggagcggctgcgccgcaccaccgtcgcgctcaacacgtcagaggcgccgggcacgatcattatcgataccggcaacaccgcgctgtattacgtgctcggcggcggccgtgcgatccgttatggcgtcggcgtcggccgcgagggcttcacctgggccggcacccagaccatcagccgcaaggcggagtggccggactggcatccgccggccgagatgatcaagcgccagccctatctgccgcgcttcatggccggcgggccgggcaacccgctcggtgcccgcgcgatgtatctcggctccagcgagtaccgcatccacggcaccaacgatccctcgacgatcggcaagttcgtctcgtcgggctgcatccgcctgaccaatgaggacgtctccgacctgttcagccgggtcgatgtcggcaccaaggtcgtggtgctgccgaagaacgcaccgcaccttgccgcgcgtgagctcggcccatccacgacgcagatctcggtccggccggcgccggtgcagccgcgccccgcggtcatgacgctgccgtccggccgtcaggcgatgaacatcccggcgacttcgtcgttgtactgagcatcggcgttggaccggggatcggtatgatgaagctcaattccaggcggtgggcgttcgggacggcggccttgctcggcctgtcccttgcgcccgcggcacaagcccaggatttcttctcacaattgttcggcggcttcatgcagggccgtccgccggtgatccggatgccgttcgacgacggtccggcgcctgtgccgcgggccgagcgacgtgcgcgctatgacggcgggcaggcctattgcgtgcgcacctgcgatggccgctattttccgctggctgcgaccggcaaccagagcaaggccgagagctgcaacagcttctgcccggcgagcgcgaccgaagtggtctatggcggcaacatcgacaattccgcgacggaagacggcaagccttattccgagttgccgaacgcattccgctatcgcgacgagatcgtctccggctgcacctgcaacggcaaggatcccgtcgggctcgctgcagtgaagatcgaggacgatccgaccttgcgcaagggcgacatcgtcgccggcaaggatgggctgatgtcggtcagccgccccgaccgtcgcggagcctcgctcaacttcacgccggcgccggaacgcatccgcgccaagtatgagcgcgcgccggtgctggcgcgcgaataacgccgctcggatcagtccagcgagatccggttccggcgtaaggaaccggacttcctctcgcacgttaggtcagtgcgaacagcacattcatcgatgccaccagggggcccgcatgctcgtcggcgtactcgtcactttccttgtcattattctcgttctttatctgatcaacatgctgccgctcgacggccgcgccaagcagatcgcgcgcgtcgtcgtcatcatcatcggcatcgtctcgctgctgaaatatctcgcggtgttctagcgccgtcagcggcgctaacaaaaaagccccggctcatcgccggggcttttacgtgtcgtcgcgatcctgagatcagccggcggccttggcctcgcggcggcgcgcggtgaggatgtattccgtgtagccgttcggctgggtgcggccctcgaacacgaggtcgcaggccgccttgaaggcgacgccgtcgaacgccggcgccattggcttgtagaggggatcgccggcgttctgcttgtcgaccacgacagccatgcgcttcagcgattccatcacctggtctttggtgatgacgccctgatgcagccagttggccagatgctggctcgagatgcggagcgtggcacggtcttccatcaggccgacatcgtggatgtcgggcaccttggagcagccgacgccctggtcgatccagcgcacgacgtaacccaaaatgccctggcagttgttgtcgatctcctgtttcaggtcgtcaggcgcccagttcgactgcgacaccggaatggtgaggatgtcggacagcttggcgcgcgggccgcccttggcgagctcctgctgccgcgctgttacgttgacctggtgatagtgcagcgcgtgcagcgttgcggcggtcggcgacggcacccaggcggtggtggcgccggcctgcggatggccgatcttctgcgccagcatgtccgccatcttgtcgggtgcggcccacatgcccttgccgatctgggcatggccgggcaggccgcaggtcaggccgttgtcgacgttccagtcctcataggccttgatccacggctgggccttcatgtcgttcttgcggatcatcggacccgcttccatcgaggtgtggatctcgtcgccggtgcggtcgaggaagccggtgttgatgaacatgatgcgcttggaggcgcgctggatgcaggccttgaggttgaccgtggtgcggcgctcctcatccatgatgccgaccttcagcgtgttctccggaaggcccagcatcttctcgacttcggcgaacaggtcgcaggtcagcgtcacctcgtcggggccgtgcatcttcggcttgacgatataggccgagccggtgcggctgttcttgaccttggaattgcccttgaggtcgtggatcgccagcaggccggcgaccgcggcgtcgagcaggccttccgggatctcctcacccttggcgtcgagcactgcgtcggtgaacatgtggtggccgacattgcgcatcagcagcaggctgcggccgtgcagcttcagctcgctgccgtcgggcttcttgtagacgcggtcggcgttgagcgaacgcgtcagcgtcttgccgcccttgtcgaaatcggccgacagcgtgccgttcatcaggccgagcgtgttgcgatagaccagcaccttgtcttcggcgtcgaccgcggcaaccgagtcttccatgtcgagaatggtggagaccgccgattccaggatcatgtcggcgacaccggccggatcgtccttgccgatgacgttgctgcggtcgatcttgacctcgacatgcatgccgttgttgacgagcaggatcgcggtgggctgggcggcatcgcccagatagccggcgaactgggcggcgttcttcagcgctgtcgcattgccgctcttcagcttgaccgagagctggcccgcgatcacggcgtaggaggtgacgtcggtgtggcttccggtcgcgagcggcacggcgacgtcgaggaacgccttcgccttggcgatcaccttgtcgccgcgggccttgttgtaacccttgccagactcgctcggatcatgcgggatcgcgtcggtgccgtagaaggcgtcgtacagcgagccccagcgcgcgttggcggcgttcagcgcgtagcgggcgttggtcagcggcaccaccagctgcgggccgcagatcttgccgatctcttcgtcgacatttgcggtctcgaccttgtgggtcgcgggctccggcagcagatagccgatctccttgaggaaggcggtgtaggcatcgatgtcgaacgccttgcccttgtgggcgcgatgccagtcgtcgatcttggcctgcaaggtgtcgcggaccgcgagcagctcgcggttcttcgggccgagcttctggatgatggcggcgagtcctgcccagaacgcgtccggcgcgatcccggttttcggtgtcgcctccttggcgatgaaatcgaacaggacaggggcgatcttcaatccatgggcatcgacacgagtcatgatgggctttctcaaagaaatgggcgtttaggcgctgctttcgtaagaaatcagcaaaaaacgcgccaaagggccgcgttcacggcccttttagccctaaagccacggctctgagaaggcccctttccagccgcacgctcccgctcaaggcgccgtggtccggaccttggtggcgatcagcaatgcggcgagtaccaggggaattgcgcccgctacgaacaccgccgacgcgcccatcgcatcaaggacgatcccgccgccggccgcgcccatcgtgatgccgaggaaaatcgaggccaccgtcagcccggtgccgctttcggtctcgtcgggcaccatgcgggtgatccaggtcgtcgtcgccaccggcacgccgctgaaggcgaatccccatagtgcgaccagcgcgagcgcgggaacgaggtccttgccatagagcgagagcaacaggccgagcacgccgatcgccagcggcatcgcgatcagcgtgagcttgagcttgcgctcggccatcagcccgctggcgaaagagccgacatagttggcgacgccgaacgccagcaacgtcgctgcgacgccggcagcgccaagcccggtcacgctttcaaggaaggggcggatatagccgaaatagccgaaatgtccggtgaagaccaaggttgccgcgaatatgccggcgccgataccgggccgggtcaggatctcgaacagggtgtcgagcccggcttcgcctctcggcgccaaacgcggcaaggccagcgcctggatgacgaacaccgctgcgcccaatgccgtggccagcaggaacacgatgcgccagctcgccacctcgccgagatagctgccgagcggaacggcgatgatcatcgcggcgggaatgccgctcatcacgatcgacaaggcccgcgcaaccagcgagggcggcaccagcctgatcgtcgtcgctgccgccatcgcccagaagccgccgatggcgaggccgagcacgatccgcgcggcgagcaggaacgtgatgttcggcgccaatgccaccagcaggttggagatcactagcagaatcgaaaagctcagcagcaccggctttcgattgaagctgcgcgtcagcctcggcgtgaacaacgcgccgaccagaccggccagcgaggtcgcggtcaccgcctgtccggcgaggcccggactgactccgaggtcccttgccatcggtgtcagcacgccggacggcaggaactccgccgtcagaagggcggtgacgccgagcatcatggcgacgacggcgccccaggccggcgcgatctgctcgtcaccaaatttgagggcggcgtcgcccggcgtcagcgcaacggcatcggcgtgcgccagggcggggtccagttcttgatccatcgaccgaaacttccatcttatgttgcagcgccgcagacataggctggaggttttggacaatctatgccagattcgcgctaatgtttgatcattcgtccagatcgtccgccgccgatacgaccgacgccgccgtcgatctggtgagcgaattgctgctcggcatgcggctcgagggtgttcactaccgtcgggtcgagacgcgggcgccgttcgggtttcggttcgagacgccgtatggacgcgcgcaattccacttcgtcgcccatggcacggcgctgctgcgctacgccgatgcgaccttgcatcccctcggatgcggtgacgcgattttcctgccgcgcggcggcgcgcatgatctcgtctcggcccctgacgagccgagttgcgacgtcgagcgtttcgcgaccgagacgctctgcggcaacgtcgatgtgacgtcggcctgtcctgaaggatgcccgcaggacgatcaggtcctggtgttcagcgcctgcatgaatttcgatcttggcgggatgcgtccgctgatcgccctgatgccggaagtgatgcgggccgatacgttgctggcgcgccagccggaaatcgaaccgatgctgaaggccatggagcgggagacctgcacgccgcgggccggctcggtcggtgtgatggcgcggctcgccgacgttcttgccgcatcgatcgtgcgcggctgggtcgaatgcggcggcgacaacgccatgggctggttcgaggccttgcgtgatccgcgtctcggccgcgcgatcggtgcgctgcatcgcgcgcccggccgcaactggacggtcgccgaattggcggcggaggcgggctgctcgcgctcgctgttcgccgaccgcttccagtcgatgaccgggctatcgcccgcgcgctatctcgccgagttgcgtatgcggctggcgtcacaatggatcgagcatgagcggcagccgatcgacgtgatcgcgcaacggctgggctatgcgtcacaggcggccttcagccgcgcgttcaagcgcatcaccgggcaatcgccggggatggtgcggcacgcggccggaagccgccgcgcggcggcggaatagctgcgcgcggagcggtcgaatgacagcgcgccgctcgtctctcacaccgccgtcatgccccgcttcaagcggggcatccagtacgccggggcctatcggctcgacaattgctgtctctggaatactggatcgcccggtcgagccgggcgatgacaggtgagcaagatcagatattcgccgcgaggtcggccggctcgtcgaacaggatgccggtcgcggccagcatccgctcgatctcgtcggtcgcatcgctgaccgagcggttcgaggtgtcgatggtcagttcattgccggccggcgcctggtagtcgttggtgatgccggtgaacgacggcaatccgccggcgcgcgccttggcgtaatggcccttgggatcgcgggtctcgcaaacctcggccggggtcgcgacatagacttcgcggaatgcgctgtcggcgatacggcgcgcggctgcgcggtcggccgccgacggcgacaccgcggcgacgatcgcgatatggccgttgcgcgccagatgggtcgcgacctcggcgaggcggcggatgttctcggtgcgatcctgcggcgagaagccgaggtcgctgttgagcccggcgcggaaggtgtcgccatcgagcagaatcggcgagccgccgttgctgaacaggcgccgctccagcgcccgcgccagcgtcgatttgccggagccgggcaggccggtcagccagaccaccgcgccattgtggtggtagcgcgccgagcgctcgtcgggccgcagcgcagactccaccggcacgatatcgatcggcactgcagggcggccggtgtcgaccgacagcacgaggccgccgccggcgatgcggccgttgacctcgatcacgaggcggccggtgcggggattgtcggtgtagggatcggtcgcaaccggctgcgccagcgagatgtcgatctcgccgacatggttgcgcgcgatcgctgagttctcttcgttggacagtgcgccgggatcgatcgccttctcgatcgcgaccacggtggcgcggctttccttggtgccgagccggatcaggatctgctcgcccttggtcagcggcttgtcgtgcagccagaagatccgggcgcggatgcggcgggtgtcgcgcgggctctgcccggaatgcccgatgatgtcgccgcgctcgaggaacaattcgcggtcgagcgtaatgccgaccgagcggccggcgccttgcgggcctccgaccggcgtcaccggccagctctcgaccgtcttgatcttcgcgatcttgccggtcggcatgatgacgatctcgtcgccggccttcaggctgccggactcgacgcggcccgccacgatgcggcggtcgtcgaacttgtagatcgcctgcaccggcagccgcagcggcagctccgccagcggccttgccggctcgagcgcgtccagcgcctcgaccacggtcggtccgttgtaccattcgatccgcggggtgtgctcggcgacgccgtcgccatcgcgcgcggagatcgggacaactgcggtcggcgtcacgccgaggccgatcagatgcgccgaaatttccgcactgatctcgttgaatcgcgcagcgctgaaatcgacccggtccatcttgttgacgaccaccgcgacctgcttcacgccgagcaggtgcaagagatagccgtgccggcgggtctgcgagcggacgccttcgagcgcgtcgatgatcaacaccgcgccatcggcctgcgaggcgccggtgatcatgttgcgcaagaactcggcgtggcccggcgcgtcgatcagcacgacgtcgcgcgagcgggtgcggaagcggatctgggtggtgtcgatggtgatgccctggtcgcgctcggtctgcagcgcgtcgagcaggaacgaccattcgaacggcatgccgcgccgcgcgctgaccgccttcagcatctccagcttgccgtccggcaggctgccggtctcgtgcagcagtcggccgaccaaagtggacttgccgtggtcgacatggccgacgatgacgatgcgcacctggggacgggtggtgccgttgggggtcgccgagatcgaagcggagggaaggatcatgttcatcaaagcactcaagccagacggggatcagagatagccggcgacgcgcagccgctcgaacgcatcctcggtttcgtgatcgagcgcgcggccggcgcgctccgggatcttggtggcgtcgagctcggcgaggatctcgtcgatgttggatgcggtggatgcaaccgggttggtgatgtcctgatcccccagcgagcggtaacgcttgccgtccttggcgagatagagcgggatgatcggaatgccttcgcgcttggtgtaggcccagatgtcggcctcggtccaatgcaggatcggatggatgcgcagatgcgcgccttgcggcggcgaggcgttgaagtgatcccagaactccggcggctggtcgcggacgtcccattcgccttcggtgccgcgcggcgagaacacgcgttccttggcgcgggtcgcctcttcgtcgcggcggatgccggcgatcagcccgtcgaagccatacttattaagtgcaagcttcagaccctcggtcttgcgcgcggcggaacgtgcggccggcggcagggtcgggtcgacgctgtcgatcggcgggcagggctcgacgcggaggtcgaggtcccattccttcgcgaaacggtcgcggaacgcatacatctcgggaaacttcttacccgtatcgacatgcattgccgggaacggaacgcggccgaaaaacgccttgcgcgccagccagatcatcacgttggaatctttgccgagcgaccacagcagcgccagcttcttcagccgggcgaacgcctcgcgcaggatgtagatgctctgggcttccagctcgtcgagatggtccatcgacgagggtgcccgatcaggttccggcacggaagatgctttaatagagcctgcggcagcgcttgtttgcggcagcctgtccacgccggattcattgtcgagaagatgcatctatcggccttggcttgcggaggtgaaaattctacagttgcgccgcaatatagaagaaataattttctatttttcggccttgatcgacagataaatagaaaataatttcagtcaacccctaagttggggaagcgagtaactgatgcgatacctgcccgtatttctggacctccaaagcggcaaggtgctcctgattggcgccggcgagcttgtgcgcgccaagttgcggctgcttgcagcagcaggcgcgcgggtccgttggtatgcgaccgacggcgatcatgatctcgccggcatcgcggtggaggacgctgcccgcatcgaacgtgccgagggagatccgcttgcggccgatctctctgacgtcattgcgattctctgtgcgggggcaggcgacatcggcgttccgatgtcggtgcgcgcgagagcggtcggcctgccggtcaacgtgatggacgaccttgtgcactccaccttcatcatgccggcgatcgtcgatcgcggtgatgtggtggtcgcggtcggcactggcggcacgtcgccggtggtggctcgccgcatccgcgagaagatcgaggcggcgctgccggcacggatcggcgatctcgccggcttcatcggccgcgtccgcaaatcaatgcatgcccgcatcgacgagtttccgctgcgccgccgcttctgggagcgcatcattgacggtccgatcggtgcgctggtgctggccggccgcaacgatgatgccgagcaggcgctgaaggcgatcgaagatcctgccgcatttgctggcgccgatacggaaggcaaggctgtcggtcatgtgacgctggtcggcgccggtcccggcgatccggatctgctgacagtgaaagcgctgcgcgcgctgcaggatgccgacgtcgtgttctatgacgaattggtgtcagttgaaattctggaccgcgtcaggcgcgatgccgcgcggattccggtcggtcgccgtgtcggcaagcccggcatcggccaggacgccaccaaccgcctgatcatcgaggcggcgcagtcggggcagcgcgcggtgcggctgaagggcggcgatccctttatcttcggccgcggcggcgaggaagtcgaagcgctgcgcgacgccggcgtcgcctactcgattattcctggcgtctccgccggtctcggcgcagccgcgcaattcgaggtgccgctgaccttccggcacgaggcgctgcgcatcaccttcctgaccgcgcacaaggcgcgcgatgccgaggtcgtcgactggtccgtgctgaccgacaccaagatgaccgtcgtggtctatatgggcatgaccgccgcgcccgcgatccgcgaaggcctgctcgccgccggccgctcgccggagacgccggtcggcgtgttcgcgcgcgtgacgcggcccgacgccaaggctgccgtcggcacgttggcgcggctgccagaactcgtcaaacaggtcgacggcggtcccgccgtcctcatcatcggcgatgtggtcgcgcattccgcgccgtggagccgatccaacgtcacccaactgttctccaaccagatgttctccgaactgctgaaagctgccgaatgacctctccgcttgaacagaagaaaatcaagatcacgggcccctcgatggtcaccgccaaccggacctgggacggtgccgtggtgtaccgaaccgccaagcagggctggtccaccgaactcgccgactccgcgatcgtgaccacgtccgacgaggcccgcgcgctgctggccgaagccaccgccgacgacgtcggcgcggtgggtccctacattgcaccggtcgagctgaaggacggcggcaaggtcaagcccggcaatctccgcgaacatatccgcgccaagggcgtcaccatcgatctccaggttcccgcgtaaggcgcgccgcgttaaggcttatcgaacatgtatgcttatgacgaactcgaccgcacgctgatcaacgagcgtgtttcggaattccgcgaccaggtgaagcgccgcctttccggcgagctcaccgaggatgaattcaagatcctgcgcctgcagaacggcgtgtatctgcagctgcacgcctacatgttccgggtcgcgatcccctacggcacgctgtcgtcgaagcagctgcgccggctcgcccatgtcgcgcgccgctacgaccgcggctacggccacttcaccacccggcagaacatccagttcaactggatcaagctcgccgagctgccggacgcgctggccgatctcgccgaggtcggcatccacgcgatgcagacctccggcaacaacatgcgcaacgtcacctcggaccagtgggccggggtcgcgccgggtgagatcgaggatccgcggatctggtcggagatcatccgccagcacaccacgctgcatccggaattctcgttcctgccgcgcaagttcaagatcgcgatcaccgcgtccgagcacgaccgcgcggcgatcaaggtccacgacatcggcttgcgcctgcacaagaatgccgacggcgagaccggcttcgaggtgctggtcggcggcggtctcggccgcacgccgttcatcgccaagaccatcaagccgttcgtttccggccgcgatatcctgagctacatcgaggcgatcctgcgggtctacaaccagtacggccgccgcgacaacatctacaaggcgcggatcaagatcctggtgcacgagctcggcatcgagaaattcgccaaggaagtcgacgaggaatggaaggcgatgggcgatgtcgggctgacgctcgaccacgccgccatcgaggaggtccgctcgcgcttctcctatccggcttacgaaaagctgccgcacatgccggacgagctgaagcaggccgcgaatgatccgctgttcgagcgctggcgcaagaactcggtatttccgcacaaggtgcagggctattcgatcgtggtgctgtcgctgaagccggtcggcggccctccgggcgatgccaccgccgagcagatggatgcggtcgccgacctcgccgacaaatattcgttcggagagatccgcgtcggccacgagcagaacctggcgctgccgcatgtcgccaagcgcgacctgccggcgctgttcaaggcgctcgaccggcttgggctcgcgacgccgaacgtcaatctggtgaccgacatcatcgcctgcccggggctggattactgctcgctggccaatgcgcgctcgatcccgatcgcgcaggagctgacgcggcgtttcgccaaccacgacaccgccgacctgatcggccggctgcacatcaatatctccggctgcatcaatgcctgcggccatcaccatgtcggccacatcggcattctcggcgtcgagaagaatggtgaggaattctaccagatcacgatcggcggccgcgccgacgagaacgcgcagttgggtaccttgattggcccggccgttccctatgcggaagtcgccgacgtgatcgaagacattgtcgaagcctatctcgcgctgcgcgaccgtcccgaggaattgttcgtcgacacggtgaagcgtctgggtgtcgagccgatcagggagcgcgtctatgccactcgttaagcagggaagaatcacgaccgatccgttcgtgcgtgtcgccgacggtgccgaactgccgggtgacggcgcggtgctggtcacggccgaacgctttctcgccgatcccgaggcgctgctgcgccgttccggcaagctcggggtgatctggccgaacaaccgcagtctcgaggatctcgtgccgcatctcgatcgtctcgcttcggtcgcgttggtgtttccgaccttccgcgacggccgcgcctacagccaggcgcgcctgctgcgcgaacgtcatggctatgaccgcgagctgcgcgccatcgggcagattctacgcgaccagttcgtgttcatgacacgtgccggcttcgacgccttcgaggtcaagaaagatgccgatgccgatgcgttcgccgcgaccatgaagcgctattcggtgttctaccagccgaccggcgacggccgcgtcaccgcactcaatcgccgcatgcagctgcgtcactcggagagcgcgagccagtgagcacgcttgcaccagagctcgctgcgacgccggccgcattgcccgcagccgatgtgctcgatcgcgcgctacgcacggcttcgcccgccgaggtgatcgctgccgccttgcggatagtcggccgcgagaagttggcgctggtgtcgtcgttcggcaccgagtccgcggcactgctcaaggtgatggcggacgtcgatccttcgatccctgtagtctttctcgataccggctggctgttcgaggagacgctggcctatcgcgatacgctgatcgagacgctcggccttaccgacgtgcgctcgatcaagccggatgaagcagcgttgtcgcgccaggatccggaccgcgaattgtggttcaccgatcccgacgcctgctgccggatccgcaaagtggagccgttggcgcgggcgctgaagccgttcgccggctggatcaacggccgcaagcgtttccagggcggcgcccgcaccgacatcccggttgtcgaggacgatggcgtcaggctcaaattcaatccgttcgccaacgtctcccgcgaggagatcgaggcgatctacaccctcggcaagctgccgccgcatccacttgtcgcatcgggatatcagtcggtcgggtgtatgccttgctcgagccggtccgctgccggcgaggatgcacgcgacggccgctggcgtggccgggcgaagacggaatgcggcatccacacgatgaagatgtcgtagggcctgattcggaaagtgcgcagcggttttcctgcgacaaacgtgaagcgtttgcgcggggatcatgctcgaaaatgccttcgatcgcgatgatctttcatcgcgatttggggacgcgacaaagccttcgcagcgtggcgacttcgtagcacaagcgcgctgcgccgctgaaaacaaagaaaaccggttttgttgacttaggggcgcttcaccgtgagttatgtcttgggtgttccctgacattctcaggttgaatggagacagaaatgatccgtcgtatgctgccgctggtcgcgggattgttgtgggcgagctcggccttcgcggcagactattcgctgctcaacgtgtcctacgatccgacgcgcgagctctatgtcgatttcaacaaggcgttcgccgcggcctatcagaaggataccggcaagagcgtcgagatcaagcagtcgcacggcggctcgggctcgcaggcgcgctcggtgatcgacggattgcaggccgatgtcgtcacgctggcgctggcctatgacatcgatgcgatcgcgggcaagggcctgctcgctgcggactggcagaagcggctgccgctcaacgcctcgccctatacctcgaccatcgtgttcctggtgcgcaagggcaatcccaagggcatcaaggattgggacgatctgatcaagcccggcgtcgccgtgatcacgccgaacccgaagacctcgggcggtgcgcgctggaactatctcgccgcctggggctatgcgcagaagaagttcggctcggccgataaggcgaagaaattcgtcgccgacctctaccagaacgtcccggtgctcgacaccggcgcgcgcggctcgaccgtgaccttcgtcgagcgcggcgtcggcgacgtgctgctcgcctgggagaacgaagccttcctggcgttgcgcgaattcggcccggacaagttcgagatcgtggcgccgccgcagtcgatcctcgccgaaccaccggttgcggtggtcgacaaggttgtcgatcaaaagggcacccgcgcggtcgccgaagcctatctgaagtactggtacaccaaggaaggccaggagatcgccgcgcgcaactcctaccggccgcgcgatcccgagatcgccaaggagtacgaaaaatccttcgccaaggttgaacttttcaccatcgacgacgttttcggtggttggaccaaggcgcagaaggagcacttcgccgagggcggcatcttcgatcagatctacaagaactgatcgagatatggcccgggtcgaacagggggatatgtgagcacagcggttgcacgacgcagtaccctgccggggttcggtctcaccatgggactgaccctgacatggctctccgtcatcatcctgattccgctggccgcgctgttcctcaagacgtttgagctcagcctcgatcagttctggggcatcgtcaccagccgccgcaccttgaacgccctgaagatttcgttcgggctttcgtttgcggccgcctgcgtcaatctggtgatgggcaccatcatcgtctgggcgctggtgcgctaccgctttccgggccggcggctgttcgacgccatcgtcgatattccgtttgccttgccgaccgcggtcgcaggcgtggcgctgacgcagctgtttgcccaaaagggctggctgggcgcgccgctcgccgagctcggcatcaaggtcgcgttcacgccgatcggcatcttcatcgcgatgatcttcatcggcatccccttcgtggtccgcacggtgcagccggtgctgatcgatctcgatcccgagatcgaggaggcggccgcgagcttaggggccaatcgctggcacaccgtgtttcgcgtcatcctgccgagcctgatcccggcgctgctcaccgggttcgcgctcgccttcgcccgcgccatcggtgaatacggctcggtgatcttcatcgccggcaatctgcccaacgtctcggagatcgcgccgctcctgatcgtgatccggctgtccgaattccgctacgccgatgccaccgcgatcgcggtggtgatgctggtggcctcgttcctgatcatcttcctgatcaaccggctgcagcgctgggcgcaagcccgcattcccgtgcattgaggtccgagatgtcgatgcagacgggattggcgacctcgactacgcagctgcggagctacgcgcccgcgaccgatgtcagcgtcgcggcccctgcaccgcagctcgatatcgcgcgcgctgggccggtcgccgcgggacgcaacccgcgcaccgagccggggccgatccgcttcatcatcatcgcgctggcgatcgccttcctcagcatcttcgtcgtgctgccgctggtggtcgtgttcgcctcggccttctcgaaaggcatcgtcgcctatctcgcggcgctggccgagcctgaggcgctcgccgcgatcaagctgacgctgctggtcgctgcgatctcggtcacgctcaacctcgtgttcggcgtggtcgcggcctgggccatctcgaaattcgagttcaccggcaagacctttctgatcacgctgatcgacctgccgttctcgatctcgcctgtcatctcgggcctggtcttcgtgctgctgttcggcgcacagggctatttcgggccgtggctgcaggcgcacaacgtccacatcctgttcgcggtacccggcatcgcactggcgacgatcttcgtcacctttccgttcgtggcgcgcgcgctgatcccgctgatgcaggagcagggctcccaggaggaggaagcggcgatctcgctcggcgcctcgggcctgcaaaccttcttccgcgtcacgctgcccaacatcaaatggggcctgctctacggcgtcctgctctgcaacgcgcgcgcgatgggcgagttcggcgcggtgtccgtcgtctccggccatatccgcggcgagaccaacacgatgccgctgctggtcgagattctctacaacgaataccagttcgtcgcgtcgttcgcgatcgcctcgctgctcgcgatgctggcgctgatcacgctggtggcgaaaactattcttgagcggcggctcgacgaggctgaggtgcccgatggcgattgaagtcaggaatatcgtaaagcggttcggcagctttgccgcgctcgacaatgtcgatctcaaggttgccgatggcgagctgctggcgctgctcggcccgtccggctccggcaagaccacgctgctgcggatcatcgcagggctggattggcccgactccggcgaggtcgcgatcgatggagagaacgcgctctcgcgcggcgccagcgagcgtcaggtcggcttcgtgttccagcactacgcgctgttccgccacatgacggtgttcgagaacgtcgccttcggcctgcgcgtgcagccgcgcgcgatccgcaaggatgaggcgacgatccgcgcacgcgtcaagaacctgctcgatctggtgcagctcgactggctcgccaaccgctatcccagccagctgtccggcggccagcggcagcgcatcgcgctggcgcgcgcgctcgcgatcgagccgcgcatcctgctgctcgacgagccgttcggcgcgctcgatgccaaagtgcgcaaggagctgcggcaatggctgcgctcgctgcacagcgagatccacgtcacctcgatcttcgtcacccacgaccaggaggaggcgctcgaggtcgccaaccgcgtcgtggtgatggacaagggcaggatcgagcagatcggctcgcccggcgaggtctatgacaatccggcgaccgccttcgtgcacggcttcatcggcgaatccatcgtgctgccggtcgacgtggccggcgatgcggtgcggctcgacggccgtccgctgaacattccggcgctgggcgcggcgtccggcgcggccaagctgttcgtccgccgccacgacatggcggtcggtccggccggaaccggcgcactggaaggcgccatccgccacgtccgctcgttcggcccgatccagcgcgccgaggtcgccctggccggcagtgagggcaagaccgtgatcgagatcgatgcgccccgcgaccgcgagctgcaggccggcgaaatcgtctcgctgcagccccgccgctaccggatcttcgccgcgcagtagctgccgcgggtccaaacctctccttgaaaaggggaggtcgccttgctcgtcagagcaaggcgggtctgtctccacgataaccgctatcgcctgtggctgaccccccatcccgaccttcgccctttcggcgggaaggagaaccccatatccgtcgtcgttccgggttcgcttcgcgccccggaatgacggcgttttgtgtggtcaaaagttagcccctgttcaccattcagccacggttggtatgcaacaacggccagccaaccttgggggttttctgaagtgaaacggacgacggtcgccctgttcgggcttctggtgcttgccggctgcgccgcggacaccaaaatcccggaagaaccggcgatgtatctcaacatggcgcagcccggcgccgtcctggacagccaggccgccgcgatcctgttttcccagtaccgccagaacaatggtctcggcaccgtcgtggtcgatcctgacctgaccaggctcgccgagcagcagtcgcaggcgatggccgcccgcaacaagatggaccacgacgtgaaggccccgctcggcaagcggctggaggccggcggctacccggcgaccgtggcggtcgagaacatctcggccggctatcacacgctcgcggaagccttttccggctggcgcgattctccgccgcacaaggccaacatgctgaaaagcggtgtcacaaaaatgggcatcgcggccgtttatgcccccaacaccaagtacaaggtgttctggacgctcattctggcggcaacctgatttcgataaattccgcgtgatctaaccctcccatctcgcagattgacgcggcggccaacagcggccaccgttgtggtccaggtcgtttttgagcgaacggttacgaatggatacttcggattccgcgccggcctcgacgcccgcgcaagcgaggcgggtgctggttcttcagggcggcggcgcgcttggctcgtaccaggccggcgcctttcaggcgctctgtcatgcaggcttcgagccggaatggatcgccggcatctcgatcggcgccatcaatgccgcgatcatcgccggcaacgagccggacaagcgggtgcctaggctgaaggaattctgggagatggtgtcggcgccggtgccgtggaatccggtttccaagcatgagcgcgcccgctcgctgttcaacgagacctctgccgccatcatcgcgaccttcggcgtgcccggcttcttcacgccgcggatcccgccggcgccgctgtggccgcccggcagctcgcagtcgctgagctattacgacaccgcgccgctgaagaagacgctggagcgcctggtcgatttcgatcgcatcaacgacctgaagacgcggctgtcggtcggcgcggtcggcgtcacctcgggcaatttctgctatttcgacaactacgaattcaagaagcgcggcaagacaatcggccccgagcacatcatggcctccggcgccctgccgccgggctttcccgccgtcgtgatcgagggcgagcattactgggacggcggcatcgcctccaacacgccgctcgacttcgtgctcgacgaggagaccagccgcgatctgctgatcttccaggtcgacctgttcagcgcccgcgggccgctgccggagacgctgctggaggccgccgagcgcgagaaggacatccgctattcgagccggacgcggatgaacaccgacaagaaccggcagatccacaacgcccgcatggcggtgcgcgacctgatcggcaagctgcccgattacctgaagaacgatccgtcggtcgaattgctgcgcaaggcatccaaggagaacaccgtcacggtggttcacctgatctacaagagcaagaactacgagagctcttcgaaggattacgacttctcgcatgtcgggatggtcgagcactggggcgccggcgtgcgcgacgtgcatttgtcgatgcgtcacaaagaatggctagaacggccacagtccggggaaaccatggtgacttacgacctcacgggggacgaacccacgccccctgaatcgagccccccgcaagcaaaataggagcgaccgataatgggtacgttgacaggcaagaccgccgttgtgaccggctcgaccagcggcatcggattggcgtatgcgcgcgccttcgcaggcgccggcgccaatatcgttctcaacggcatgggcgttccggccgacatcgagaaggaacgctccggcatcgagaccgacttcaaggtcaaggccgtgcattcgccggccgacatgaccaagccggccgagatcgccgacatgatcgcgctcggcgagaagaccttcggctcggtcgacatcctggtcaacaatgccggcatccagttcgtgtcgccgatcgaggaattcccgcccgagaagtgggaagcgatcatcgcgatcaacctgtcgtcggcgttctacggcatccgcgccgcggtgcccggcatgaagaagcgcggctggggccgcatcatcaacacggcgtccgcgcactcgctggtggcctcgccgttcaagtcggcctacgtctcggccaagcacggcatcgccggcctgaccaagaccgcggcgctcgagctcgcacaattcaagatcacctgcaactgcatctcgccgggctatgtctggaccccgctggtcgagcaccagattccggagaccatgaaggcacgtaacatgaccaaggagcaggtcatcaaggacgtgttgctcgccgcgcagccgaccaaggagttcgtgacctcggagcaggtcgcagcgctggcgctgttcctgtgcggcgacgatgccgcgcagatcaccggcgccaacctctcgatcgacggcggctggaccgcggagtaattatccgccggcactgacctggcatcaaagagccggccccgattggatcagggccggctttttagggtagaaagctgcccgaactagctaaagcatgatccggaaaagtgcgaagcggtgttccgaaaagatcatgctcaaacaaagagctaaagcgcgatgacgattcaaccaaatatcatcgcgctttagggtccaaatcggcgggggagaacggcgttcgggacgcatgtctgatgtgcaggatatcgattgtatcgctgcgcacccgatagaaaatgcggaacggatagcgcaggacggtaattgcgcggaccgtggagcgctgcgagatgcgcggcgcggcctcgggtgcgcggcagacccggtcaatgacatcgcggaagcggcgctcggcagctgcggcgattgccgggctggcatgggtcgaatagtgggtcgcgatttcgtccagatcagtcagtgcttgccgcgagaagacgaccttcatttgcggcgaaatttggcaaacgcgcctgcgatctcctcgtcggtcgcgcactcgccggcgtcgatcgatgccatcgcggcgtcgatgacccgcagttcatctcgagttgcgacgtagtcttgggactgtagctcgctttcgatctgatttgcgatcgacacgaattcatcctgtgccgcctcgggccaggattgaacgcgattgagcaggtttttcagttccgctgcggtcatgccgtgtattatatgccgcggtcgatcaaaatgctacggcgtaggccgggccttcccgaacgccagcacgtgcaggccgaggcgcgagcgcaccacgacgaacagcaggatcgtctcgaaggtcagcgacagcgaggtcgaggccgccgcgcccatgccgccgtagcgcggcaccagcgcgatgcagagcccaacattcatcaggaacgataccgcataggcggtggcgcagatactctggtggccgagcatgttcagcagccgctccaccgggccgatcgccgagcgcaccacgagcccgatcgcggcgacgaacatgatgctgtagccgtcgacgaacttcgggccgaacagccacagcagcggcttgccgaaggcgagcagggcgatggttgcgagcagcgagggccagaacgtccagctgatggcgtgcgcgacataggccgacagcctatccttgtcgccgagcgcgttgtattcggcgaagcggtgcgccgtcgtcgccgacatcgcgtagtgcacgaacgacaccagcgccagcgtcttcaccactgcgaaatagatgccgacctcctcggaggagcggaattgctgcagcatcagcacgtcggtgtagccgagcaggagatagaagctctcgaccagcatgatcggcagcgagatcttaaaccagcctttgaggtcgtaggtcttctcgcccggcccgagatgggctttgaggcggcggttcagcacgatcatctggccgatcgccgcgatgtagacggcggctgcgctcgcgatcatcgcggcggtggcgccgagattgaggccgagcgccagtgcgccggcggtcagcgcgatgatcagcccctgccgcacgatgaattgcggcatcaggccgagctgcatccagtcatgcgcgcgcgagatgccgtcctgcgtgttggcgaccacgaacggcggcaaggtcaggcagccgatatagagcggcacgatcgcattggggtcgatccagggcgaggcgagatggatcacgccggcgagcagcagcgccacggtgctggaggcggcaagcaccacccagcggccgccggaaaggaagccgcgcagcgcggcgaggtcgccgcgcgtgcgatattccgggatgatcttctgcgaagacggcgcgatgccgaaatccatcgtgctgccgagcagcagcacccaggtccagacatagacatagatgccgtagtccgagccgctcatccagcgcgccaaaaggatctgcgccagataggcgatggcggcgctgatcacgcggatgatgaagatcatgccggcgaggcgcttggtgaccgacgcctccttggtgccgccgagcaggcgcgcgacgaggtcccgcaggcgcgcgaccgggcccgatggcgcagaggttgcggcagaggattccgattgtgtctccatcacagccaaggcggaaaaattcccaaagcgccgcaaggcggcaatggtcaccgatctatcaacgaatcgttaagattgggttgggtgacggatgctcgcaacccaggcgtcgtcccggcgcaggccgggacccataaccacagggaacagttgacgcgcacagcttaacccgcagcgtgcctcgcactgcggccgcggagtatgggttcctgcttccgccggaacgacggtgggcgtcagttcaaattgatattgaattcatagctcttgtcgccgccgaccagggtcagtttcagcgcggcgccgtccgccttggcgccgggcggcaacccgtcgagctcgaaggcgaagcgcttcacgcccggcggtgcatgctcgacgagcttgggcaccggcagcgcccagtccggcgtcggtccctcgacgaagaggctgaggtccttgctttccggcgcggtgacatcgaccagcacgttgttgccgtcgcgcttgacgtcgcggatcgtgacagggatgggatcgccgatattggcgggcttcggcaccgcgttgagcgcttccgacagcgcggcgtcctcggtcgaggcgacgctcgcgaacgcaagctcggctttcgcttccaccggcacgcacagcttctcgcacaccgcgtaactgatgtcggcgcgcagcaccaacggcttgtcgggattcttcgcgacgatgcgcagcggcagcaccacctgatgcttgtagccgagcgaggtgccgccggcgccgtcgtcgaactggcgcggcgccggccacatcaccgtgaccgcatcgacattgtccgatttggagaaatcgaaccgcggcggcacgccggaatcgcccggcgtgcgccagtaggttttccagccgtcctgcaactggaaggcgatgccgccgagcagcaccgcgccgctgcgcgatcccgcgagcagccgcacggccgaatgggtgtcctgctgccacggcgaagcgtcgtcggcgcgcacctcagttgccatacatgcgacggacaatgtggcggcaacgccaaaagcggcccgcaggggaactgtgacgatcatgagacgtctttacctgcaactttcgttgcaaaccattgaattgcttgtgatgcatcgccgcacgcggcgtgatgcttgattgacagaaccgccacccaatatcaggatgccaaatcagcaggaaaggcctttgtggatgcgccctgaaggcaaaacaggcaggactcgcaagaccgccggcggcagaagcccggccgtcggtccgcatgccgcagacggcggctatctcgatggccagatgctgatcgcgatgcctgtcatgaacgacccgcgcttcgagcgttcggtgatctacatgtgcgcgcattcgtcggagggggcgatgggcatcatcgtcaatcgcccggccggcagcatcgatttccccggactgctggtgcagctcgacatcatcgagaagtcggaccagatccagctgcccgaaaatgccgagatgatgaaggtgatgaagggtggcccggtcgataccggccgcggcttcgtgctgcattccagcgacttctacattcaggacgcgacgctgaacatcgacgacggcatctcgctgaccgcgaccgtcgatatcctgaaagcgatcgccaagggcgccggccccaagcacgcgattctcgcgctcggctacgccggctgggcgccgggccagctcgagaacgagatccagcacaatggctggctgcactgcgacgccgatcccgagctgatcttcggcaccgacgtcgacgagaaatacgcccgcgccttgcgcaagatcggcatcgaggccggcatgctgtcgaacgacgccgggcacgcgtaggccgcgcaccacacccacggtgtcgtcccggcgaaggccgggacccaaaaccccgactgcttgtgatttcgcgacgctgtggcctcagcgcgccccattcccacgtcctgtggttatgggtcccggctttcgccgggacgacggctgttatcgcggcgcgctactccgccgcttcctgcgccaccgtcggctgggtgccggccaccgtggcgcggcgcatgtcgcggggctgcgactggtcgtaacggcggacgcggtgcacggtctggcggttgtcccacatcacgaggtcatgcagcgtccatttgtgcacatagacgaactcgctctgcgtcgcgtgctcggtgaggtcgcgcagcagcacccgcgcctccggcatgctcatgcccctgatcgcgccggcatgcgatgacagatacagcgatttgcggccgtgcaccggatgggtgcgcaccaggcgttgcagcaccggcttgaacatctctttctcttcctcggtgtagtcgaggaagccgagcgagccgcgcgaatacatcagcgagtgctcgcagatcatgtcctcgatctccgccttggtgtcgtcgtcgagcgcgtcataggcggcgcgcatatcggcgaattcggtgttgccgcccttcgggttcacgacgcgcgccgacagcagcgagaatttcgccgggatcggccggaacgagctgtcggagtgccacaggcagttgccgagattgaacagatgggtgcggtgatccttcggcagcggcttgccgtccttgccgagattgccgacatcgttgagcccggacgacaggcgatagtcctccttcttcgtcaccgtgccgccgcgcgagtgctcgcgctcgccgaagttcagcgcgaacgccatctgctgctcgtccgtgatatcctggccgtggaagacgagcacggcgtatttgtccatgccggcctcgatgtcggtcgcttcctgcttcgtcagcggcttgcgcaggtcgacgccggagacctcgccgacaaagtgcttgtgaagctgccggatcaggaccgtcattggcgtatctccccgtatcgtgcgggcggttggcccgcttcgtctgatttgacgggaaggctactcccgacgcgcgcgctgtcaacgcttcacggccgagcgggcagcgaatgcgggtcaggcattccgcgccatcaacccgccgtcgaccggaatcaccgcaccggtcaggaacgatgccgcgggcaggcacaggctcagcgtcatgtgcgcgacctcttccggatcgccgtagcgcgccagcgcagtgcggcgcttggcgtagatcgtcttgtgctcctcggagatgcgatcggtgatgcctgtgcggatcgggcccggacagatgcagttcacggtgatgccttcgcgccccagttccaccgcgagcgagcgggtcaggctggtgacgccgcccttggccgccgagtaggggctgtgcaggcctgttgcacccagcgcttcggtcgaggcgatgttgacgatgcgcggcgagcgcgacttgcgcaggtacggcagtgccgcgcggatgatgcgcggatgcgccgtcagcatcaccgcgatgcccttggcccaggcatcctcgtaaccgggatcgtcgatcggcacccgcaccgagatgcccgcattgttgacgatgatgtcgagccccccgaaatgcgcggcgacatcgttgacgactttgatgatggcgtcgcgatcactgacgtcgagcgtccaggccttcgccgagccgccgctcgccgatatctccttcgccaccgcctgcgtgccgtcttcggtcaggtcggtgaccgcgacattggcgccctcgtcggcgaacacgcgcgcagtggcgcgccccatgccgcttgccgctcccgtgacgagaacggtgaggcccttcaccgaacggctgagctgcttgtattcggacacgacggacctcccgttgatttttttgcgttgtgagaccggcaacgctggcaccgatccgcagagacgtcaaaccggcgttccctgatcgccgcgcacgcagcgcgttaacgcaagtttcccgggtggcttttcgcaaaggatcatgctcaatcaagaaaacagcagagaggaaacgcgatgaacgagcttgatttcggcggcaagcaggtactggtggtcggcggctcctcaggcatcggcaacggcattgcgcaggccttccgcgccaagggcgcgcgcgttgcggtgtacggcacccgcgcccaagcgagcgactattcggctgaagaaggctcgcatctcgacggccttgcctatgcgcaactcgatgtctctgatcccaaggcgatcgaaagcctcacaccgtcgttcgatcggctcgacgtgctggtgctggcgcagggcgccgtgatttaccgccgcggggaattcgagatggagggtttccgcaaggtgctcgaagtcaacctgatgagcctgatggcctgcgccaccaaattccatgcgatgctgagcgcgagccaaggttcgctgatcatcgtgagttcgaccgcggcgtatcattccaccatgggcaatccggcctacaacgcctcgaagaccggcgcggtcgggctgacgcgcacgcttggtgaagcgtgggcggagaacggcatccgcgtcaacggcatcgcgccgggcctcgtcgacaccaagatgaccaaggcgacgaccgccaatcccaagcggctcgaaggcgcgctcgggcgcattccgctgaagcgcctcggcacgcccgccgacatggccggcgccgctttgttcctggcgtcgccgctcgcctcctacatcgtcggccagaccatcgtcgtcgacggcgggctgatcctctagctccagaagagctaaaggaacctgcgcgcggttccgcggttagctccctgacaatttcagggagcagatgtgatggacaaggaccggattttcggaacggcaaaggaattcgcgggcaaggccgaaggcgtaatcggcgatgcgaccggtgatgcgcaaacacaggcctcgggccgcgcacgcgaggctgccggcaccgtgcaggatctctacggccaggccaaggatgccgcgcgcgacgcggctgataccgcggtcaactatgccaaggatgcctatgagcatcgcggcgagaccgttcgcagcgggcagaaggcggtggcgcagacggtgcaggacaatccgctcggcgcgctcctgatcgccggcggcatcggctttgcgctcgcgctgttgatgacgcgtcagccacgccgcccgccgccgtcgcgctggcgccattacggctgatccgccgtcattgcgaggagccaccgggtcgcgcgtacgcgcgcccgatgacagggtccgcgacgaagcaatccatccatctgcccgtgcggatagatggattgctttacttcgctcgcaatgacggatgcagcgccgcttactgccagggatccccaggcccggcggcgcgctgtccgacactgcgcggcggacgcggtggcggggggagcagcgggcgctgctgcggcgcgccgaagccgaagaagtcacgcagccagggctgcggctgctgctgcggctgagcctgggccggacggaacacgcgcttctgcggcttcggcgcggtgatgatcgaaccgtcgggcgcgatcgccgtggtcgacggcggcgggttggcaggtgctccggccgccggcgcagccggcgtcgccgcggcgaccggcacgtcgcccttggcctgctcgcggccgatctcgcggcgtggccaggcgaaatcgtcggcgcggccggccggcggcgccagcgcctcgcccttcaccagcgtgcgcgcggcgagcgcatcgacggcggcgggccgcgagccggggccgccgagcaattgatcggtgccgaccgtggaggcgaccagcggcagcaccgggcctgcgagcggtcgcggcgggggcttgccgggttcggtgctggtctcgggcgccgccggttcgctcggcagcgcgatcgggccggtgcgcacggcgagcaggcgcgtcacctcgcgctcgacataatgcgcgagcttgcgcgcgccggccttggtgaagaacacgccgtcgtcggagcgcagcttgcgcggctggccttcgaagtccgggcccttcggcatgaagcggccggcctcgtcgacgaagccgtcccagacgtcgacataggtaataccggccttgccggcgccgtcgcgatacagcgcgtcgaggaacagcatgtccgacgtgcccttctggccgcggatcgcgggcaggccgacccacagcaccggcacgcccttgctcttcagcacgttgatcagctcttcgatcttcttgccgtagagctcgacccagcggtcgtcgcggaaatcatagaggccgttgggcgagcgcgcggtcttgtccggtgcggcttgtgaatcgtcggcgtcgtcggccggcaactcgggatcggcaggcttggcgtcagccttgccatcgttcttgccatcattcttgccgtcgctcttgccgtcattcttggccgtcgcatcgggcttgtcgccgggcttcgcgtccggtttggcgcgcgcgtcctttttctcgtccttcttgtcgaccttcttctccacgaccggttcgcggatcgcggtgcggtcgttgaggccgagcattacgacgatggcgtcggggttctcggtggcgagaatgcccttcgcggccgccgcccaatccgccgggtcgcccttgggctgatagcggatcaggccggacaccgtcttgtgcttgcggatcacgcccatgtcgggctggtcggaatacgcatcttccaggccataagcgagccagtcggccatcgcgtcgccgatcaccagcacgttgcgctcggccgcggcttcgcgcttggccggcggcggcgcgcgcgaaaaatcctcgcgcggccgctgcggctgtgattgcggttgctgctgctggaacggcgcgaagaaatcgcccccgaaccagccgccgccaccgccgtgctgtggaggcgcgcggcgctgcggttgcggcggtccgccgccgaagccggggaagccgaagatctgtgccgaggccggctgcgcaataccgatcaggagcgcgagcgccaccgccagcgcagccagcgggccggcctcggtgaatacgcgcaggaaggacttcggctctcgcatcgggttcggtcgcaaatgatctggaagcaggcgagtatattagcggaatcgggccgcaagcgggcagcttttccaccataaatcgggtgcctccggccgccgtcaaggcgagcggcaaatatcggatttcacggttactttcgggggagaggcccgggtgccaccacgaaggaactgcgctccctctcccccgcaagcgggagaggtgacttagcttgtcgctaccgcccccgcagccgctccagcacctccgatgtggcaaagccgtcggccggcgccccgatcgagacctggaagccgcgcagcgcctcgcgggtctggccgccgaactggccgtcgggcgtgcccttgtagaagccacgctgggccagcagctgctgcagttccagccgctcggcgcgcgacagcacccgctcctggcgcggccagggctgcacgaagggctgaccgccgcgcaggcgatcggcgaaatggccgattgcgagcgcataggcctcggccgggttgtacttcatgatcacccgaaaattctgcagcatcaggaagcccggcccctcggcgccggccggcgccagcagataggccttgtctgacggccgcgggaattgctggccgttcggccgcttgacgccgagctgctcccattgcgacagcggcatcgccttggcgcggtcggccagcatgtagttgaggccctgcggcagcaccacctcgtagccccagctcgcgccggtctgccagccgtccttcttcagattgttggcggtcgaagcgatcaagtcgctcggattgtcgacgacgtcgcggcggccgtcgccatcgccgtcgacggcgaagcgcttgaacgcggtcggcatgaactgggtcgggccgaatgcgccggcccaggagccgcgcatctgctcgggcctgagatcgccgcggttgaggatctccagcgccgacaggaattcatccttgaaataggcctgacggcggccgatgcaggcgagcgtcgctgtcgactgcaccacgttgcgatcgcccatctgggtcgagtagtttgattcgatgccccagatcgcggcgatgatgtagcggtcgacgccataggcgcgctcggtcgcgtcgaactgctgcttgtatttggcgaggatttcgcggcccttggcgagccgtgtgtcgctcaccaggatatcgagatagtcccagatcgccttggtgaactccggctgcgaatccatcaggtccatgatgcgcaggtcgggttgcaggccggcggtgaagcgctcgaaattctgctgcgtgatgttgcgccgcgcggcatccggccacatcgccgcgacgcagttcgggaagtcggatgcggcctggcggatcgcggcggcggtcatcaagggatgaccggaagcgccgtcctcgccgctccagggtggggctgcaccgtcctgaccggtcgcggcctgcggcggcgtcgcgttcggtccggagaagatgctgtcgatcaggttggtcaggccgttgcccgccgactgggcctgcgtgctgacgggcagcagcagggccagcgcgacaaggctcgcgctgaaaagcgtggtccgcggtgttccggtcgagcgcattgtcgtgtgcctgtcaaaatcgtgctgcctgagaaggccccgtcacggtttccaatatcttaacaatgggcggcattttgggcgtgacgaaatcgcgcgcagttgtttgaccgggacaaattgtccggcgtcatcaactcgtcttcgactggtccctcagacccgccaggataccttcggcattctcaaaacagtcgccgcccggtggcgtggcttcgatccgggcgatcacggcctcgagcccggcctgggtttcagacaatcgacaacgcaaggcttcgacctcggccaccttggtcttcaacgcggccaccagcctgtccttgctccagtctcccttgccgtgcggcggcagcaggttccggatctcgtcgagcgaaaatccggcctgctgggccatcacgatgatctcgaggacctgccgggtcccgcgcgaatactggcgatagccgttcaggccgcgatcgatcgagccgatcaggccctgccgctcatagaagcggatgcgcgacggcgcgaggccggattcccgagccagttccccgatcttcactgccgatctccttggcgtcttgaccttaaagttaactttaaggttatggtccgtggcgatcaacaaggaaattggctgatgtcgccgttcgagcccctgaccctgcccaacggaagcagcattccgaaccgcatcgccaaagcggcgatggaggagaacatggctgacgccaggcatttcccgtcggccgaattgctgcgcctctatcaggcctgggccgacggcggcgccggcctcatcatcacgggcaacgtcatgatcgatcgccacgccatgaccgggcccggtggcgtcgtgctggaggacggcaccgagctcgagccgtttcgaaactgggcgcgcatcggtcgcgccaggggcgcgcagatctggatgcagctcaatcatccgggccgccagatgatgaagaatctgggccagcaaaccctggcgccgtccgccgtcgcgcttgatctcggcaagcattcgaacctgttcgcaatgccgagggcgatgaccgagcaggacatcgacgaggtgatcggccgcttcgtcagcgccgcaaggctggcggagcgcgccggcttctccggcgtgcagatccatgcggcgcacggctatctgctcagccagttcctgtcgccattgaccaaccggcgcaccgacggctggggcggtccgctcgagaaccgggcgcgtctgttgatcgagaccgtcaaggcggtgcgcgcttcggtgtcgcccggtttttccgttgcggtcaaactgaactccgccgatttccagcgcggcggcttcgatgccgctgacgccaagtccgtcgtcgagatgttgaacgcgttgtccgttgatctcgtggagttgtcgggcggcagctatgaggcgcctgcgatgcagggcgatgcgcgcgacggccgcacgctggcgcgcgaggcctatttcctcgacttcgcacgcgacgtcgccgcggtcgccaggatgccggtcatggtcaccggcggcattcgccgcatcggcgtcgtgcagcaggtgctcgacagcggcgtcgccatcgccggcatcgccaccgcgctggcgatccggccggacctgccgaacgcctggcgtcggggggaggatctgcggccagaagtcgcgccgatccgatggaagaacaagccgatggcctcgctggccgcaatggccgtcgtgaaattccagttgcggcggttgagccggggccgcacggccaatccgaacgtttcgccgttgaaggcgttgttgctggcccagctccgcaccgcgtcgctgacccgcaaatatcggcgctggatcacctcatccgccgccgcgaccgccgcatccggcggcgcgccggctccatcgcgcgcggtcgggatgccgcgataaacggaacactcgggcggaaaccgctggggtgggcggaacgtgtgcatcacacatccgcctttgttctcggctgcaaaaacggttaccaaggtgcgattagatttcgtgccgccgtcccacccgtttttcaaggcctccgataatcccatgaagatccgcaaagccgtatttcccgtcgccggtctcggtacccgcgtgctgcccgccaccaaggcgatgccgaaggagatgctgacgatcgtcgacaagccgctgatccagtacgtggtcgacgaggcgcgggaagccggcatcgagcacttcgtgttcgtcaccggccgcaacaagggcgtcatcgaggatcatttcgaccgcatgttcgagctcgacaccacgctcgcgcagcgcggcaagaagaccgagcaggagatcctggcgcagaaccagcccgaagccggcgcaatgagcttcacgcggcaacagtcgccgctcgggcttggccatgcggtgtggtgcgcgcgcgacatcgtcggcaacgagccgttcgcggtggtgctgcccgatgagctggtgctgaacacgccgggctgcctgaagcagatgatcgacgccgccaacaagctcggcgagaagtcgaacgtgatcgcggtcgaggcggtgcccgacgagctcacccatcaatacggcatctgcggcgtcggcaagcgcaccggcaacatcttcgaggtcgacggcatggtcgaaaagccgccgcagggcaccgcgccgtcgaacctgtcgatcaccggccgctacatcctgcagcccgagatcttcgacatcctggcgacgcaggagcgcggcgccggcggcgagatccagctcaccgacgcgatgatcgggcttgccaggacgcagaagttctacggtgtcgagttcgagggggagcgccacgattgcggctccaagcccggcttcctccgcgccaacatcgccttcggcctcaagcgccccgaactgcgcgacggcctgatcgccgagatgaagaaatatctggagaagtgagtttcgtcattccccggtgcgcaattgcgcatcttggggctcgcgaagcgagagcccggaatccattgcaccactggttctgtggctcgatggattccgggctcatcgcttcgcgatgccccggaatgacgaacaggcgtgcggctgactacgcctccggctagtcactcacggctcgcaacaaactcggtgtcgtccatgcgaaagcaggggtccgcactcgcaatcacccggccttccttcgtcccgcgcgcttcgccggttccttcgcgccatcttgcttcggcgcgcgcagttcgcgcgcggcgagtgagaccacgtcggcgatctgctggagctgcggggcgagcggagaagtcttgcgccagaccatgccgatggtgcgcgagggctgcgggtgcttgaagcgcgagaccgtgaccggcgcggagcgcgtctccaccgtcaccgccatctccggaatcagggtgacgccgatgccggcgccgaccatctgcaccagcgtcgacagcgagcttgcgtccagcacctcgcgcggcggcgaggactgcatgttgcagaacgacagcgcctggtcgcggaagcaatggccttcctcgagtagcagcagccgcatctcgcgcagcatctcggcgctcggcaccggcgtcttggcatcctcgcccggccgcaccagcaggaaatgctccgagaacagcgcgacctcggtcagcgacggttccgacaccggcagcgccacgatcgcggtgtcgagccggccctcggcgacctccttgatcagcttcggcgttagcgtctcgcggacatggatgtcgagctcgggatgcagccgcgccagcgtctcgatcaccctcggcagcagatatggcgcaatggtcgggatcatgccgatgcgcagccgtccggcgagcttgtcgcgcgaggcgcgtgcgaagtcgccgagctcgtcgaccgaacgcaggatgtcgcgcacgcggtgcagcagctcctcgccgaagctcgtcaaggcgacctggcgagcgctgcgttcgatcagcacgccgccgaccgcctgttccatctcgcggatctgcatcgacagcgccggctgcgacaccgcgcaggcgtccgcggcgcgcccgaaatggccgtgccgcgccagcgcatcgaaatacctcagttgccggagtgtgacatttatcatcagattatcttattgccgcgatcattaaagtcaatttcccctgatggattgaggcgcgtagaatcgttcttggaagagctccagcacattccagaatccatcacctcggagaaaaaacatggacgcaaaaaccgacgaaggcgcgggcaaatgcccattttcggcagcccctcgcggacacacgaatcgtgactggtggccggagtcgctggacgttcaggtgctgcatcgcaactccagcctgtccgacccgatgggccagggctttgactacgccaaggagttcaagaccctcgacctcaacgccgtgatcaaggacctgaccgccttgatgacgacgtcgcaggaatggtggccggccgatttcggtcactacggcggcctgatgatccgcatggcctggcactcggcgggcacctaccgcatcaccgacggccgcggcggcgccggtgccggtcagcagcgcttcgccccgctcaacagctggcctgacaacgccaacctcgacaaggcgcgccggctgctctggccgatcaagcagaaatacggccgcaagatctcatgggccgacctgatggtcctcgccggcaacgtcgcgctggaatcgatgggcttcaagaccttcggtttcgcgggcggccgcgccgacgtgtgggagcctgaagagctgtactggggtccggaaggcacgtggctcggcgacgagcgctacagcggcgagcgtcagctctccgaaccgctcggcgccgtgcagatgggcctgatctacgtcaatccggaaggtccgaacggcaaccccgacccggtcgccgccgcaaaggacatccgcgagacgttcttccgcatggccatgaacgacgaggagaccgtcgcgctgatcgccggcggccacaccttcggcaagacccacggcgcgggtgatccgtcgctgatcgggccggagccggaaggcggcgcgctcgaagagcagggcttgggctggaagagcaagttcggcaccggcgtcggtgccgacgcgatcaccggcggccccgaggtcacctggacccagacgccgacgaagtggagcaaccacttcttcgacaacctgttcaagtatgaatgggagctgaccaagagccccgcaggcgcgaagcagtggaaggcgaagggggctgcggccgacattccggacgcgttcgatccgtcgaagaagcacgtcccgaccatgctgaccaccgacctctcgctgcgcttcgatccggcctatgagaagatctcgcgccggttctatgagcacccggatcagttcgcggacgccttcgcccgcgcctggttcaagctcacgcaccgcgacatgggcccgatccagcgttacctcggcccgctggtgccgaaggagacgctgatctggcaggacccggtgccggcgctcgatcatgccgtgatcgacgacaaggatatcgaggcgctcaaggcgaagatcctcgcctcgggcctctcggtctccgaactggtgtcgaccgcctgggcctcggcctccacgttccgtggttcggacaagcgcggcggcgccaacggtgcgcgcatccgtctcgctccgcagaaggactgggatgtcaacgagccgacgcagcttaagaccgtgctgtccaagctcgaagccatccagaaggagttcggcaagaaggtctcgctggccgacctgatcgtgctcggcggcgcggcggcgatcgagaaggcggcaaaggacggcggcaccgatgtgaaggttccgttcacgcctggccgtaccgatgcgacgcaggatcagaccgatgtcgaatccttcgctccgctcgagccgcgggctgacggcttccgcaactacatcagcggcaagcgtcagttcatgctgcccgaggaggcattggtcgatcgcgcccagctgctgcggctgaccggaccggaattgacggtcctggtcggcggcctgcgtgtgctcggcgccaatgccaagaagtcgaagcacggcgtcttcaccggcaagccggggacgctgaccaacgacttcttcctcaacctgctcgacatgggcacggtgtggagcgatgtcggcgagggcgtctatgagggccgtgaccgcaagaccaaggcggtgaagtggaccggcacccgcgtcgacctgatcttcggctcgcactcgcagctgcgcgcgttcgccgaggtctacggctcgtcggatgccaaggagcagttcgtgaaggacttcgtcgcggcctgggccaaggtgatgaacgccgatcgcttcgatctcgtgaagtaagcggcggacggcaatcagggacagggcggtgcttcggcgccgccctgtttcgtttcggggacgctggtttcaagacgaaaggcttttcgtgcttggctcagtcgtgcagtttcatgtcccggatcatctcctcgaactctgcacgcgtcggcgtcgccagggcagcttgcggcgcgctgcttgctgcgatgggaccgtcacattgtgagacgtcgcgccgaggctcgaggattgcggtcaggctcgcccagcacaccagcagcgcgaccgtccagtccagtacattggttgccgtcatggcagcaccagcattgtcatgtggcgatcgtgcagccgacgtgtcccttgcgcaattcggaagctacgaaacgtaacttcggcaaaaccgagagccggatcggaagtgcgctccctctcccgcttgcgggagaggtgtagcgagcctgccgctgaaacgatgcgagctaatttcgtcgccgtcgccagtgctatccggttcgagcccgtcgtccttcgattgggtacgccggatcgttgaagcccggcgtcgagggatggcccgacaccacgaggcggtcgatcagggcctcgtcctcggcggtgaagcggtagtcgagcgcgcggatgtaatcgtcccattgcgcctcggtacgcgggccggcgatcacggcgctgacgaacgaggagttcagcacccaggacaccgcgaactgcccggcggtgatgccgcgactctcggcgtggcgcttgatctcctgcgcaagccgcaaggattccggccgccactcggtctgcatcatccgcttgtcgttgcgccccgcacgggtgtccgcgggcggcgcggcatcgggcgcgtatttgccggtcaggacgccgcgcgccagcgggctgtagggcacgatgccgaggccgtaataagcgcaggccggaaagtgctcgacctccggcatccggttcatcgcgttgtaatagggctggctcgcgaccgggcggtcgatgccgagccggtcgcagatgttgcagatctcggcgacgcgccaggcgcggtagttggagacgccgaaatagcgcaccttgccggcgcggatcaggtcccccatcgcgcgcaccgtctcgtcgagcggggtcgcgtggtcctccttgtgcaggtaatagacgtcgatgtaatcggtgccgagccgcttcaggctatcgtcggcggcctgcaacacccagcgccgcgacaggccgccatggttcggatcgtcgccgatcgggttggcaagcttggtcgcgagcacccagttcgagcggctgttggcaatcgcccggccgacgacctcctcggacttgccgccattataggcgtcggcgctgtcgatgaagttgatgctggcctcgcgcgccttggccacgatccgcgacgaggtcgcttcatcggtcggtccgccgaacatcatggtgccgaggcagatcggcgaaaccttcaggccgctgcggccgagctggcgatactgcatcgatcgttcctcccggaatgaggcgtcaactctcgttcttcaagatcttgaacacgccgttggccatcgcgatgcagcgcttgtcgaccgtcacctcggccgtgatgaagatcaggctgcgggtcgagcgcaccacgcgcggccgcgtcgtcaggatctcgccgatcttgccggcctcgacgaaatgggtgtcgagctgcaccgtcgcaagcgtcggtttgcccgagacgaagcgcgccgccatgccgcaggcgcggtcggcgaaggtcatgatcacgccgccctgcaccaggccgcggcgattgtgatgcttgtcctcggtgatcagcgcgagctccagcccgccgtccttcaaccgttcccacagcgggccgatcagcgtcaggaaacctgtggtgtcggcgaccttccagccgtcggatttgagcttgtccgcggccttgaccgtcatgagatgggggtccgttgcttgcaaatgaatgatcgtgtgattgatcgagggaggcatgccgttccgctcatttcatcaaacgctgttgtgttgtagtcaagctcgatggtccgcacatttgacgattgccacccggcggaatatcgcagagctctgtgccgcgttcgcgcgtcaggtcgcggccgatgcggcgccgacgctgaagcgcgcggcagtcgcgatcgcgctgaccgaaggtgacgacggcaatggcaccgccttcctgctgacccgacgcagcgcacgactgcgcgcccacagcgcgcaatgggcgctgccgggcggccgctgcgatgccggcgagacgcaggcggaggccgcgctgcgcgagcttcacgaggaactcgggctcaagctgtccgagcgcgatgtgctcggcttgctcgacgattatccaacgcggtccggctatctgatcacgccggtcgtggtctgggccggcgcgcatgcggcgctcgtgccgaatccggacgaggtcgcgtccgtccaccgcatcggcctcgatgcgatcgagctcgatgacgcgttcaccttcgtgacgatccccgagagcgcgcggcgcgtgatccgcttccggctcggtggccagcacattcatgcgccgaccgccgcgctgatctatcagttccgtgaggtgctggccgggcgcagcacccgtgtcgccgacctggaacagccggtgttcgcctggaagtgactgtcgtccccgcgactctccccggaaatcaccgcattgtggcgaaaatttcggagccgatcgcggcatcgggccgcctgcgatccgaacaattccgggctgacttcgcagccgtgcttgctacaacgtggccatgcgcccgcaattgattcgcctgtgtcctggatttgtcgcgttcgcgctgctcgccggcgcgccgtctgtattggccggcgaggccgatgcgttgccgccgtccgtcgccaatgcgatggcgcaggcctcgccgcaggcgatcatggactatcgccgcaagctgcaggaatacgaggaagcgcgcaccgctttcgagcaggatgcaggcgcctattggggcgcgatcgccgacaagcggcgcggccgcaacgccaaacgtcgcgaccgcgtgcagatcacgctcgacgattacgtgctgcaacagccgccggtctatgagggaccgaagcggccggtcaatccggcgcccgaagaggaaggcggcaagccgccgcgtccgccgaagacgataccggtggtctccgacctgatccgggcggcggccgagcaattccagttcacgccgcagcggccgtcgagcgaggtcgagttcaagcgcgcctatgcgcgttacgcgcgcgccgcaggactgacgccggagcaggcggtgcgggtctattcattcgagaccggcggcaccggcaattacgacgtgcaggccggcatcgagcatggcggcaagcgcgccatttccaccgcgatgggctacaatcagctgctcaccaccaacaccgtcgagctgcttgccgagcagggccatgaattcgtgcgggatctgaccgagcgcgttgcgcggacgcaggggccggcgcgcaaggccatggagcacaagctcgcggtgctgaagaagatggtcgcgttcacccgcaccgtgcccgacgactggtcggcgcatcagcgcctcgccgacaccccgcagggctgggcgtgtcacgccatggtgctcgacatcgacatcggcccgatgctgcagacccataagctgctgacctcggtgatcttcgcccgcaacaagggctacggccggccgctcaccgcggccgagctcgagatgatgaacctgaccggcgacggcaccggcttcgacatggtgaccatgccgcaggcgatgcgcgagcaggtgccgaccgcgaatttcttccagcgctcgggctacgagcgcaacccggtcgcgatccgccacaacaccgtggcgaggctgctcgctgtcaccaacgagcgcatggacgtcaacagcaacaagcccggcgccagggaattggccggcgcgttctgaactttggcgaaaaccgtcaggcattccggttctgattgaatcagaaccggagccctgggctcttcgctcgacgcgtcttcttcacgcgaaccggcgtccacttcgctcggaaacgctctaattcgagccgaacatgaacttgccgtcgccctcgagatagggcccggagcgcatgtagagctggccgttatggccgatgaagaacagcgtccctttcggcaccttcttggcgcccttcagcagcgtgttggcattgctggtccccatcttgtaggcccaggtcttgccgtccttgtcataggcgtagcccatgtcggtcttcagctcccagggcgcggcttcctgcgcgaatgcgcatgtcgtcatcgcagcaagggtcgcggtcgcaataaaggtcttggtcaaaaaatgcgtcatgatccacctccggccgaaaaacggcgtcgtccccacgttcttgaacaaatcacgaacggcgttcgcgcgtcaatacgacaatcggcgcgaccgcgcgctgacatcagcgactttgtgatttcccgagtcaagcttggcgactatcttcgcgttaccgtttacaaacgcttcgattgcaggaaacacgacctggggatgatcaggatgaagcacgtcatgaagattggtatcggtgtcgctctgtcgttcatggcgctggcgtcagtcgcgcgggcggacgagttcaagctctccaacaaccagcggatctcctgcagccgcggcctgtcggccggcaagctcaacacctcgacctgcaagtcctacgcctatctgttcaacgccaagacctcggaatatttccgctgccaggtctcgctggcgctgacgcgggacaacaaggaagtcatcaacgtccaggccgacggcggctgcaccaagaagccgcgcatcttcgacaccgacggcaattatgcgttcgacgccaccgagaccgagccgccgaacaccaattcgttcttcggcaccggcggctatgcgatctgggccagcgacaccaacacccagaaggtccgcggctgcatcaccatctcgtccggcctcggctccgatatctcgaaatgcctcgacatgacgtttcagtgatggcggcgctgatcgcgtgatgcgtttgatcgcgcgcggcggggcgctgcgcgcgatcgatcgcgaagctcgggcctgaccgcaggcggtgcctcaggaggccggctctttctccgagaagtgcatgcgagaacgggcgaacttcttgacgcccatcggcttgccgaacaggtagccctggacctgatcgaaatccatctcgtgcgcggcgagaaaatccgcgcgcgtctcgaccccctgggcgacggcctgcgcgccggcatcgtgggcgagctcgacgatgcgccggcacaccgtctgcttcaggcgctgatcggcgcagccggtgacgtattgatgatcgaccttgagctggacgaacggaaagttcggcaatcccagcaaggacggccagttggcgccgacattgtcgatcgagatgccgatattgtgcaggcgaacgcgccttgcgacctcgaccgcaaggtcgagattgtcgatcacctcggtgctgtcgacctcgatcagcaggccggcgaaagccgcatggtccggaatccggtagcagagctcgcgcaccgcatggtcgtccgcgagaaacgagatcggcagattgatcgagagattgatcggcccgatctgttcgatgagatagcgccagtcctcgatcgcgcgctcgatcacgaactcggacagtgcatgaaaatgcggatcgctttcgtcggggatgaagtaggccggcggcacgacgccccatgcgggatggcgcatccggatcagtgcctcggctccgcttggaaccagcgtccggagatgaatcttctgctgataccacagctcgagccagccggccttcagcgcttcgggcacgtccaccgcggggctcggcgccggttcgagcggaagcaatgacgcaagactgtcacgaagggttccagcgctgaacggcgtggacagggccggcagcatggcgatgccgtactcgtcgccgatctggcggaccgccttgacgatgatggagtccggttgcccgatgacgaggaccttgccgcgatagtcctttctcaccaaagtctcgagaattttactgacttcgatgccgtccacggacacgccgagcaccagaagatcgggccgttccgcgtccagcacggtgtcgagttccagggcctggccgcattcgctggtgatgaagccgaggtcttccagcgcctctgcaaggaaggttcgaaggtgttttttgctgtccgcaatgcacgcgcgcggggtcagcttgcgatgtccgaaccatccggctcgtggttgtgtgatgtggctgatgtgattcatgccccgccttatccgtaattaccccggctcgactcgtacatctaagaaccccggcaatcatggaaatttctggttcatacattgattggctcgctaaccttaaaggattcaattcgaatcaaatgatgctggaattgccgcgtatcgctgcggtgacgggtgcaacaaatgcgtcatctggcgttcacgagtgcgatcgcgcccgactttgaacgtgcgcagaaacgttgcgcgcgtgtgccatcgagagacggtgttaatgaatgtgttgtcgcgtcgatgcgggcgcggatttgcatcattgtcggacatcggatcgcttcgtgcgaacgttccgcaggacagcgcaagcgaatcgcggatcatccgttgtgtgatgcagatgccgtcatgcgtgacgttgtcgtcgccgttcgcaacgtgccccagacgtcgaccgtgcgttcgtccagcatcgtaaccggcacggtcaggagatcgatcgcaaggtaggggcccgagctcgtccgcatgtcggcgaggaagaagtcaacgcatcgagcgcgcgcccgacggtcgacgtcccggacggctgcaagtgatacctcgcggcgagattgcgcatcttgctcgcacgtgcggagctccggtgcaggtaaggtggtgctgccgtcagggatttcggccgcgcatgcgtcatttggatgggttgacccggcaggggctgtccggccaatttccggcccggcttaggggagaataatgctcatgaattcaaggttgatggctgccgcgatcgtggcagccggtgttttgtcggcgccggtcgcgcaggccgagcagttcattaacgtgctcaccggcggcacctcgggcgtctactatccgctcggcgtcgcgatggggaagatttacggcgaaaagatcaccggcgtgaagacccaggtgcaggcgaccaaggcttcggtcgagaacctggtgctgctgcagcagggccgcggcgagatcgccttcacgctcggcgattcgctgaaggccgcctgggaaggcgacactgaagccggcttcaagaccaagctcgacaagctgcgcaccatcggcgcgatctatccgaactacatccagatcgtcgccaccgccgaaagcggcatcaagacgctggccgatctcaagggcaagagcctgtcggtcggtgcgccgaaatccggcaccgagctcaattcgcgcgcgatcctcgcagccgccggcatgagctacaaggacctcggcaaggtcgagtatctgccgttcgccgaatcggtcgacctgatgaagaaccgccagcttaacgccacgctgcaatccgccggcctcggcgtcgcctcgctgaaggatctttcgacctcgagcgagatcaacgtcgtcgccgtgccgaaggagaccgtcgacaagatcggctcgcccttcgtctcggtgatcatcccggccaacacctataccggccaggacaaggacgtgccgaccgcggcggtcgtgaactacctcgtcacctcgagcgcggtgtcggacgatctggcctaccagatgaccaagctggtctacgaatcgctgccggagctcgccaatgcccatgccgcgggcaaggagatcaagctcgaggccgccgcgaccggcagcccggtgccgctgcatcccggcgcgatccgcttctacaaggaaaagggcctgatcaagtaaggccggttgcttcgagcgtgccatggccgggctggacccggccatgcatctttccaaagatgttgatttttcgatggatgcgccgggcgagccgcgcatgacgtgcagcggggcgctataaacctcgcgggcacggcggggggactgattcaatgcagcagcaggttgcgagcgagcagcccatcaaggttgaattcgacaatttcgagcatggcttccctgaaggatttggtccgggcgcctgggggcatctggcttacgccatcggtctcgccttcgcagtgttccagctctatgtcgcggccttcaactatctgccgagccaggtggtgcgcggcgtccatgtcggctttctgatcctgttgaccttcggactgatcggcaacttcaccgccaagaccgatctcggccgcgcggtgagctggatcgtcggcgcggccggtttcctctgcgggctctatcagtggatcttctacgccgacctgatcgcccgcgacggcgatccgacccacatggaccttgcggtcggcacgctgctcgcgatcctgatcttcgagggcacgcggcggctgatgggagcggcgctgccgctgatgtgcggcgcctgtctgctttactggttcttcggccagtatctgccgtcgccgttcaatcatcgcggctatgatttcgaccagatcgtcacccatctctcgttcggcaccgaaggcttctacggcgtgccgatctacgtctcggcgacctacatcttcctgttcatcctgttcggctcgttcctggaacgcgccggcatgatccagctgttcaccgacgtctcgctcggcctgttcgggcgcacccgcggcggcccggccaaggtcgcggtgttcgcctccggcatgatgggcacgatctcgggctccggcgtcgccaatgtcgtcaccgtcggccagttcacgattcccctgatgatcaagttcggctatcgccgcgcgttcgccgcaggcgtcgaggccaccgcctcgatgggcggccagatcatgccgccggtgatgggcgcggtcgccttcatcatggcggagacgctcggcgtgccctattcggagatcgtcaaggcggcggtgattccggcgatcctgtacttcgcctcggcgttctggatggtgcatctggaagccggcaagcatggtctcgtcggcatgaagcgctccgagatcccgagcgcctggaaggcgctggtggcgcgctggtacctggtgttgccgctcgcggcgctggtctacatgctgttcgaaggcttcacgccgctctatgccggcagcatggggctggcgctgacggtcgcgctgatcctcggcgccagcatcacgctcggcttctccaacaccgtcgtgcgctacatcttctggatcggccttgcgctggtggtcgccgcggtgtcgcgccacgggctcgagatcgtccctgtcatcggtgtcgtcgccgggctgatcgtgatcgcggcgatcacgcgcggcggccgcgccacgctcagggcgtgccgtgactcgctcgccgacagcgccaaatcggcgctgaccgtcggcatggcctgcgccatcgtcggcaccatcatcggcatgatgacgcagaccggcgtcggcaccatcttcggcagctggatcatcgggctcggcgccaagagcctgttcctggcgctgatcatgaccatgctgctgtcgatcctgctcggcaccggcattccgacgatcccgacctacatcatcaccgcggcgctggcggcaccggcgctcgccaagctcggcgtgcccttgatcgcgagccacatgttcgcgttctactacggcatcatggccgacctctcgccgccggtggcgctcgccgcactggcggcggcgccgatcgccaaggagaatccggacaagatcggctgggaagcgatgcggatcgcgcttgccggctacgtcattcccttcatcttcgtctattcgccggccttgatgttgcagggtggcgatccgatggcggcgcaactcggcttctacggcgcggtggcgctggcgaccttcaaggcgctggtggcgatcgcactgttcggcatcgtcgcgatcggcttcctgttcacgcggctgagcctgatcgagattgcggttgcattcggtgcggcgctctgcctgctcggcgattttccgttctcggacactgcgggcttcacgctcgccgccgcggtcgcgctgtggcaatggcggcagcgcccacgcaatgcgatggcggcggcttgagcctctgcctcacctcggcgggggtggtgaagacgctgcaggtcgcggccttcacgctcgcctggacgcattcgatcgagaagaccgcctggcaggaagactggctggccacgccggccgggctgacgctgcaacaagcgcgtatcaagggcagtggcgccggcatggagccgccgccggaggcgaagctcatcggcggctggttgcaatggtcgccgccgccggtgccgagggcggagatcgtgctcggcaattccggcgcggcgggcgaatggcatctttgccacgcgggacgctgccagacgctatcggagattttcggacatccgatcggtgctaatgtcaccacgatgagcgtttgcgagccataacaaacaacaagggagaaagaccgatggatcggctcaagggcaaggttgcgatggtggtcggggcgggctcgatcgggccgggctggggcaacggcaaggcgaccgccgtcacctttgcgcgcgagggcgccagcgtgttctgcgtcgatcgcaacggcgcggcggccgaggagacggtcaagatcatcaccgaggagggcggcaaggcggctgcattcaccgccgatgtctcgcgcgccagcgaagtcgaggcgatggtcgcggcctgcctgaaggcctatggccgcatcgacgtgctcgacaacaatgtcggtatcgccgaggtcggcagcgtggtggaggttgcggaagcggaatgggaccgcgtcttcgcggtcaacctcaagagcgcctatctgtcgatgaagcacgtcattccggtcatgatcaagcagggcggcggctcgatcatcaacatctcctcgatcgcctcgatccgccatgtcggcatttcctatgtcagctacaatgccagcaaggcggcgatgaaccagatgacgcgctcgaccgcggtcgagttcgcctccaggcatgtccgcgtcaatgcgatcctgcccgggctgatgaagacgccgatggtcgcgcattcggccgggctggcgcagagctacgccaaaggtgacgtcgaggcgatgtggcgcgcccgtgacgcgcaggtgccgatgggccacatgggcgacgcctgggacgtcgccaatgccgcgctgttcctcgcctcggacgaatcgaaatatgtcaccggcatcgagctcgtggtcgacggcggcatcacctcaaagtccggggcgtgagcaacgagtgctcgcttcacctctcccaagggagaggtgaacctccgctgccgatccagttcaacccaaactcttcatgcgctacgcctcgacgctgagctcggcgcggtcgagctcttcctcgaccagatggaaggcgtcgtcgccgatcgcctcgctgcggcgcagaccgagcagtgcctgacgtgcggcggcgatggcgcggcgccgcagcggatccgccggcagctcgcgcgtactcaacccgccatcggtctcggcgcgcagcagcacggcgcggtattcgagccggaggatctcggcctcctcggacgggtcggagtcgatctcgtcgagtgcggcacgaaaggcgacgctgcgggcgtgggcggcctcgcgcccgaccgggtcatcgtcagcgaaattcagcgccaggatcagcggccgcaaggtcaggccctggatcaccagcgagcccagcaccacggcgaacgcggtcagcaggatcaggtcgcgaaacggaaaccactcgggcagtgcaaacgccgccgccaatgtaacgatgccgcgcatcccgcaccacgacacgatgaagccgcgcttcggggtcggcaccgcctccaccacatgggcgggcagccaatggcgcgccttcagcgtgcgcaacagcgcgccgtagggcatcacccagaggatgcgggcgaggatcaccacggcgaggatcgcggcggcgaagctgcaatatttccaccgcacctcggcgtcgaggtcggaccagatcgggcgcaattgcagcccgatcagcatgaaggcgagcacgttgagcacgaagacgacggtctcccacaccgtataggacgacacgcgcagccgcgccgaggtgcggtccggcgcggtgcgggcgatggtgatcgcataggcgatgatggtgaggatgccggacagcccgagatgctcggcggtgatccacaccatgaaggtgccgccgaactgcgtgatgatcgcgctcggcgcctcggtgatgcggcgcgtgatcatcatccagatctgcgcgaacaaatagccggcggcaaggctgccgaccagcgcgaccgtgatggacggtatgaactcacggatcttcatgtgctcggcggcgaccaggccaaccgcgacccggtagatcagcagcgcgctggcatcgttgagcaggctctcgccctccaggatcttctggatccggtagggcagcttgacctggcgcaggatcgcggtggcggccgcggcgtccggcggcgccacgatggcgccgagcgcgatcgcaaccggccagggcatgtccggccgcagccagtgcgcgatcacggcgactgccgtcgtcgtgacgccgaccgcgaccacgaccagcgtcgagaccggcagccagttgttgcggagatcgcgcagcgaggtgtcgaaggcggcgtcgagcagcaccggcgcgacgaacagcgccagcgccagctccggttccagcgcccaggtcggggcccacggcagcaacgtcagcagcacgccgccgatcgccaggaaggtcgggtagggcaccttgatccgccgtgccagtgctgacagcgccaccgccgcgagcaacaggccgatgatccattcgaacgtgagcaaggcgaacccccaaagcgcggcgcgcgacgtgctgctccgagtgcgacacccgattgcagccgatcgtcgcaattgacgtataatccagcgtgtggtttggcggcaaatggcaccgcccgaaatcggagccggtggtacaggcgcgggatgtcttgtcggtgatgggaatgcgacgcaactctgcaaatctggctgtcgcgttgatctgcgcatgcctgtcggtcgcatcaggcgtcgcgcgcgcgaccggcagcgaacccggcaaggatgtgcaggccgatcctggcccctgcaatgcggcggttgcggcagccgatgacgacaggatcgtcgaggcctgcggcgcgctgatcgacaatgagaaggcgacgaagcccgatcgcatcaaggccctgatggcacgcgcgggcgcctatgaccgcaagcagctgatcgatcgcgccatcgccgattacgacaccgtgctcaagctcgatccatcgcttgccgatgcccacaatgcccgcggcgagctgtggcgccgcaagggcgaccggccgaaggcgatcatggatttcggcgccgccgtcaagctcaatcccgatcacgccgccgccaaggccaactacaaatcgctgtcgctggagctggagcggatcggcgccatgatggcggtcgccggcaagccgagcttcgattgccgcaaggcgcgccggccggtcgagaaggcgatctgcgccgatcctgcgcttgccgatctcgaccgcgagatcgtcgcatcgacctttcgcacggtgcgtgaggccggggatccgcgccaggcgcgcgaactgcaacgcgcgcaggatggtttcatcgcccgccgcaatgccgaattcggcaagccgggttatgacctgcaaaaggcgatgcgggagcggttgcggcagatcaacggggtcgacggcaactagtgctaacgtccgtgagtttgcggcttgaattatcggtcaagcccatgacaatgacggccaaagagagccaaccatccagtcgtcatgcccggccatgacgatggagtgaggcgagggagagacgcgatgaacatccagcagagccggtatcatgaggtgcatgcccgctcgcttcgggaccccgaagggttttgggccgaggcggcgcgcgagatcgactggatcgagccggcgaagaagatcttcgatcccaccgtgggcgcctatggacgctggttcaccggcgccgtggtcaacacctgttacaacgcgctggatcggcatgtcgccggcggcagggcttcccaggtcgcgctgatccatgattccccgctcaccaactcgatcaccaaattcacctattcggagctgctgaaggaggtgcagacgctcgccgcgatcatgcaggatttcggcgtggccaagggcgatcgcgtcatcctctatatgccgatggtgccggaggccgtggtcgcgatgctcgcctgcgcgcggatcggcgcggtgcacagcgtggtgttcggcggcttcgcggccaaggagctcgcgacccgcatcgacgacgccaagccgaagctgatcttctcggcgagctgcggcatcgagcccgggcgcattgtccagtacaagccgctgctcgacgaagcgatccgcctcgccgccaccaagccggatacctgcatcatcctgcagcggccgcagcaggcgtgcgagctcaccgcgggccgcgatcatgattgggcgacgctgcgcctcgccgcgttcgatgccggcaagaccgcgccctgcgtgccggtcgccgcgaccgatccgctctacattctctacacgtcgggcacgaccggaattccgaagggcgtggtgcgcgacaatggcggccatctcgtcgcgctgaaatggtcgatggaaaatctctacggcgtcaagccgggcgagatctggtggtgcggctccgacatcggctgggtggtcggccactcctacatcgtctatggcccgctgatccacggcgcgaccacgatcatgtatgagggcaagccggtcggcacgccggatgccggcgcattctggcgtgtgatcagtgagcacaaggcggttgccttcttcaccgcgccgaccgcgttccgcgcgatcaagaaggaagatcccgagggcaagttcatccgcaactacgatctctccagcttccgcaccctgttcctcgccggcgagcgcgccgatccgccgacggtggaatgggccgagcagcagctcaaggtgccggtgatcgatcactggtggcagaccgagaccggctggtgcatcgcgggcaatccggttggcttgggcatgctgccggtcaagcacggttcgccgacggtgccgatgccgggctatcaggtcgacatcgtcgacgaggcggcgaaacctgtgccggcgggcaccatgggctcgatcgtgatcaagctgccgatgccgccggcctgcctgccgacgctgtggcagcaggacgatcgcttcagggacgcctacctctcggaattccccggctactacaagacctcggacgccggctacaaggatgaggacggctatgtctgggtgatgggccgcaccgacgacatcatcaatgtcgccggccaccggctctccaccggcggcatggaagagatcctggcctcgcatcccgatgtcgccgaatgcgcggtgctcggtgtcaaggatgcgatcaagggcgaagtgccctgcggcttcctggtgctgaaggccggcgtcaccaaggcgcccgatcaggtcgagaaggaagtcgtggcgctggtacgcgagaagctcggcccggttgccgcgttcaagctcgcgatcacggtgggacggctgcccaagacccgctccggcaagatcctgcgcggcaccatcaagaagatcgccgacggcgagtcctggaccatgccggcgacgatcgaggacccgaaggtgctcgacgagatcggcgaggcgctgaagggcaaggcgtaaccgcgattgtcgtcggtgctttgctctgttcggtggagagactgccggtgtggccacccctctccctaaccctcccccgcaatgggggagggaacccttcggctagtgcctccctgacgtagagcgagtcgtgggcggcatgcggttgacgctgtctcgcgtcaggtgagcacgcgcgtcaggctccctccccccttgcgggggagggtggggagaggggtggccccgggcgcgatgatcgatgcgcgcaccatcgcgcaatcgggccgcgtctcgaaacgcatccggaagcaaatcggccttgattttgatggattgccgggtcatcccggcctttcaaactcacaggccaccagatacggaccaccggatgcgatccatttccgcacgcgcgcctctcgcattgctgctcgcactgccgctgctggcaggttgcctcgaacgcgggcgatcgccgatcgcggagagcatgggcgacgacgatcagtattgccaggccggcggcaaggtggcggtcggcacgcccgaatatgtcgcctgccgcaaggaccgcgacgtccagcgccagaacgccgaagcccgcaccgaccggcggcagcgcgatctcggcgaatacatgatgaacaatccggaccggcactagcgcggtgattgcggccctgccggaacgcgacaggatcggagagctcgacgggctgcgcgcgatcgcgcttctgatcgtcgtcatctggcactatttcggcgcgccggacgggccagcgagctggccgtggaaattgctgcatgtcggccgcttcggcgtcgacctgttctttatcctgtccggctatctgatcaccgatatcctgctgcggcaccgcacggctgagcgatattactcggcgttctacggcaggcgtgcgttccggatctggccgctttactacctgatgtgcgcctgcgccctgatcggttggtatttcgcgctgagccccgatctgttcgacacccgaggcgtgcccggctggctgtatctgttcggcttgcagaatttcggcatggccaaggcacagaccgatggcgcctattttctggccgtcacctggtcgcttgcaatcgaggagcagttctatctgctgtttccattgctggtccgcaacatcccgcccgagcggctgttcgcgatcctgctggtgccgatcctgatctgcccgatcgggcgcctgatcgacagcgcgctgccggacgcctatggctggtacgtgctgccgcaattcaggatcgattcgcttgcgaccggcgcgctgatcgcctggtggcgcctctatcgcaagccggatgcctatatctccaggcttgtcgcaaacatcctcaaatggtcgagcatctcgcttccgctgctgtggctgttcggatggaagcgctggtcggtggcgttctcgcacacccaggtcgagatcttcttcggtgcgctgctgttcgtcgtgctggaaaatcgcggttcaccaagattagcactgctgcgcagctcggccgcgaccttcttcgccagaacctcctacgcggcgtatctcacccaccacgtcgtcgtgtacctgctgttcgccgtgctccatgagccgagaacaatcaagagcctcgccggaatctcgctgaccttcggcgcgctcgtgctgaccttcgggctgtgtgccctgagctatcgctacttcgaacgtccgctgctcgatttcgcccaccggcgcttctcgttcgcctgagcgaaggcgcgtgcggggatcatggctattcgtgcccctaaaagaaaaacgcggcggggtggcccgccgcgtttggtatccgctcgtcgcgctgcgacgtccgcgcctactcttcgtcgtcggccttcttgccgccgatcgtcttcagcttggcgaacacggcatcgacgttgagatcgtcgtgccgctcgatcggctgatcgtcgagctcgtccttgcgcgtggtctcggaggccggcagcagcgtggcgccgccatagacggtcgtggtcggcttctccttggcggcgcgctgcacctcgaaatcgagctcgatctgcgagcacaggccgagcgtcaccgggtccatcggggtcagcgtcgaggcgttccagtgggtgcggtcgcgcacgctcgcgatcgtggtcttggtggtgccgaccagccgcatgatctgggcgtccttgagctcgggatggttgcgcaccagccagaggatcgcgctcggccgctcatggcggcgcgacaccggggtgtagcgcgggcccttcttcttggcggcggagggcagcaccaccttgctctcctggagcctgaggcgatagttctggtcgcgttcgccgcgctcgatctcctcgcgcgtcagctggccgttggaaatcgggtccatgcccttgatgccctgggcggcgtcaccgtcggcgatggcgcggacctcgagggggtgcatcttggtaaaatcggccacctgatcgaaggtcagggcggtattgtcgaccaaccacacggcagtcgccttcggcatcagcggtgcgttgctcatggcaaatctcctttgtgcttcgcccacctctgtcgaggcgaagctggtagtcatcggcgatgacgggaattatgccgcctatataagccctccggggggaatggcgcaatgggccagcaaaatcgccttgacagcgcccgaaagcagtcccaagtccttaccttaactggccgttccccgcccgccggcgaggggtgattcggtcccgaaattgccccgacacagccccgagaccagcccgatgtcagcgaaaaaacccgatcttaaaatcgtgctttgttccccccgcggcttttgcgccggggtggtccgcgccatcgacacggtggaacgcgccctcaccatctatggcgccccggtctatgtccggcacgagatcgtgcataacaagtacgtggtggacagcctgaagaccaaaggcgccattttcgtcgaggaattgtccgaaatccccgacgaaaccaacgccccggtggtgttttcggctcatggtgtgccgaaatcggttccggccgaggccaaatcccgcaatttcttctcgctggacgcgacctgcccgctggtgaccaaggtgcaccgcgaggcggcgatccatttcaagcgcggccgcgagatcctcttgatcgggcattcccaccatccggaggtggtcggcaccctgggccagctgccggagggcgccgtgaccctgatcgagaccgccgaggatgccaaaaccttcgtcccgaaggatcccgacaatctcgcctttgtgacccagaccacgctgtcgatcgatgacaccgcggagatcgtggcgctgctcaagcagcgcttcccgaacgtcaacgggcctcacaaggaagacatctgctacgccaccaccaaccgccagcttgcggtcaagaaggtggcgccggtggtcgatgccctgatcgtggtcggcgcgccgaactcgtcgaactcgcagcgcctgcgcgaggtcgccgagcgcgagggctgcccggttgcgatcctggcgcagcgggccagcgacatcgactgggcgcgcttcgaaggcatcaagagcctcggcatcaccgctggcgcttcggcgccggaggtgatcgtcgaggagatcatgggcgcgtttgccgagcgctaccaactgcacgtggagacggtctcggccgcggaagagaacgagttcttcccgctgccccgctcgctgcggcccgacgctgccgcggcggaatagaccatatggcggtctacaccgacgttgccgccgaagatctcgcggaattcctcaaaagctacgacatcggcgaattgctctcctacaagggcatcgccgagggtgtcgagaattcgaacttcctgctgcacaccagccagggcgcctacatcctcacgctctatgagaagcgcgtggcggaggacgacctgccgtatttcctgtcgctgatggcgcatctcgccgagcgcggcgtgtcgtgcccgcagccggcgcgcaaccgtaaggacgaggtcaccagccggctcgccggccggccggcggtgatcatcaacttcctcgagggcgtgtggccgcggcggccgaacgtcgcgcattgctcaggggtcggcgaggcgctggccaaaatgcatctcgcgggtgccgactttccgctggtgcgcaggaatccgctgtcggtgtccggctggcggccgctgttcgatctcgctgccgcgcgcgccgacagcgtgcaggtgggcctgcacgacttcatcgcgcgcgagctcgatcatctcgaagcctcctggccgaccgatctgccggtcggcgtcatccatgccgatctgtttcccgacaacgtgttcttcctcggcgacagactgtcgggcctgatcgacttcccgttcgcctgcaacgacatcctggcctacgacgtcgcgatctgcctcaacgcctggtgcttcgagccggatcattccttcaatgtcaccaaggcgcgcgcgctgctcaacgcctatggccgcgagcggccattgtcggcggcggaggaagcagcgctgccgctgctcgcgcgcggtgcgtcgatgcgcttcctgctgacgcggctggtcgatttcctcaacgtgcccgagggcgcgctggtgcagccgaaggacccgctggaatatgtccgcaagctgcgcttccagcagaatgtcgcgagcctgaacgactatggcatcacgccggccggatgcgcggcgtgagcgacaagccgcatgtgacggtattcaccgatggtgcctgctccggaaatcccggaccgggcggctggggcgcgatcctgcggttcggcgacgtcgaaaaggaattgaagggcggcgaggcgcacaccaccaacaaccgcatggagctgatggcggcgatctcggcgctggaagctctgaagaagccgtgcgtggtcgacgtcaccaccgacagccagtatgtccgccagggcatcaccggttggatccatggctggaagcgcaatggctggcgcaccgccgacaagaagccggtcaagaatgtcgagctgtggcagcgcctcgacgccgcgctgaagccgcatgaggtgcgctggcactggatcaagggccatgccggccacgccgagaacgaacgcgccgacgagctcgcgcgcgagggcgtggcgatggcgaagctgaaggggtaggggcgcgctggcggtgcgaaccgtctgcgtagcgtgggtagagcgcagctaaacccacgatctccatccgcggcacgaagttgatgggtttcgctgtgctctacccatcctgcaattccgcgatcacagctatcgccaatccctaaactgtcatcgcccgcgaaagcgggcgatccagtactccagagatggtggtgcttgagccgagaggccgcggcgtactggatcgcccggtcaagccgggcgacgacagctcaggtgcggcgaaagctcagctcagagctgcccgagcagcgtgtcgccgccggagacttcgaccttgcccggagccggctccttgttgagcttcttcaccacgccgtcctcgaccagcatcgagtagcggtgggagcggatgccgaggccgttgccggaggcgtcgagctccatgccgatcgccttggtgaagtcggcattgccgtcggccaggaagaccgcctcgtcgcgctggtcggtgtcgcgcttccaggcattcatcacgaaggcgtcgttgaccgagacgatcgcgatggtgtcgattcccttgttcttcagggcataggcgttgaggaagatgctcggcagatgcatcttgtggcaggtgccggtgtaggcgccgggcaccgcgaacagcgcgaccttcttgcccttgaagatgtcgtcggtggtcttgacctgcggaccctcggcggtcatcacgcgaaacttggtttccggcagcttgtcgccaacattgatcgtcatcggtgttctccctcggtgaagcggaattgtcttaaacccggctgcggaatggcacaatacgggctcgccgaagaacggcaatgcccggccatcgtcactgttccgtcatcagccggaaaacccgccggcatcgagaaaggcctgctcctcggccgtggtctgccggcccagcacgcgattgcggtgcgggaagcggccgaaccggcggatgatgtcggcgtggtcctcggcgtacttcaggttgtcggggtggcagtcatattggctgaacagcgccacgcagcgctcttggtcgtcgaggtcctccgaatgctcgaacggcagatagaggaattcgcgcaagcgcgggtcagtccgcgtatcgacgccgcgctcgatggcgcggcttgccacctcgcgggccagcggatcgctggaaaaggtctcggcgtcgccgcgaaacaggtttcgcggaaactggtcgagcacgatggtcaacgccagcgcgccctcgtcgctcgcctcccagggcgacaactcaccggcagccgccttctgccaggtggcaaggaagcggctgcggatctcggcatcgaaggcgtcgttgcgtgcgtaccagcggtcgcggccggcctcgcgccagaaggcgagcacgtcggcaggcgtcgcgatgcgggcgtcagtcacgtcggtccagcgcccgcttgccgttgtcaggccgcagccttcttctcgtcgcgcagttcgcgacgcaggatcttgccgacattggtcttcggaagatcggtcctgaactcgatctgcttcggcaccttgtaggcggtgagctgggtggccgagaacttgatgatgtcctcggccgagacgttcgggtccttcttgaccacgaaggccttcaccgcctcgccggacttcgcgtcgggcacgccgatcacggcgcattccagcacgcccggatggctcgcaatcacttcctcgatctcgttcggatagacgttgaagccggagaccaggatcatgtccttcttgcggtcgacgatcttggtgtagccccgcgcgtccatcacgccgatgtcgccggtgcggaaatagccgtccgcggtcatcactcgcgcggtctcgtccggcctgttccagtagcccgccatcacctgcgggcccttggcgcagatttcgccggcctggccgatcggcagttcattgccgtcgtcgtcgcggatcgacagatgggtcgagggcacgggaagcccgatcgagccggagaattcgtcggcgtcggccgggttgcaggtcagcgtcggcgaggtctccgacaggccgtaaccttccgacagtgcgcagccggtcaccttcagccacttctccgcgaccggcttctgcgtcgccatgccgccgccgaacgaggtcttcagcttggagaagtcgagcttgtcgaaaccgggcgtgttcaacaggccgttgtagagggtgttgaccgccgggaaactgttgacctggtacttcgagagctccttgatgaagcctaccatgtcgcgcgggttcgggatcagcaggttgacgccgccggcgcgcaccgcgagcaggtagcacgcggtcagcgcgaagatgtggtagagcggcagcgcgcagacgatgagcagctgctcgacatgcggcggcttcttcagcgccggctgcagccaggcgtcgttctgcagcacattggcgagcacgttctggtggatcagcgtggcgcccttggacacgcccgtagtgccgccggtgtattgcaggaaggcgacgtcctggcgcgtcagcaccggcttgttgagcttcatgccgcggccggccgacagtgcctcgttgaacgagaccgcacccgggatcgaccaggccggcaccatcttcttcacccgccgcaccaccagattgacgatcacgcccttgaggccgagcaggtcgcccatgctgccgacgatgacatgcttgaccgcggtgttgggcagcaccttctgcacggtggtggcaaagttctccagcacgatgatcgcttcggcgccggaatccttcagctgatgctcgagctcgcgcggggtatagagcgggttgacgttgaccacggcaaagccggcgcgcaacacggctgcggtcgcgaccgggtattgcagcacgttcggcatcatcagcgcgacccgcgcgcccttctgcaggcccttgctctgcagataggcgccgagcgccgacgacatctcgtcgagctcgcgataggtgatcgccttgtccatgcagatgaacgccttgcggtcggcgaacttcttgaagctctcttccagcaattcgaccagcgacgaatattgcgtgacgtcgatatcggcgggcacgccggccggataatgcttgagccagatgcgctccataatggtctttccctctctcaaatttggctgatgtcccggattgcttccgggttctccgaccctgggtcgtattattctcggtcgcggtatttcagtcagtattgagcgatgccgcggcggatggcaagccgctgcgcgctatcgacgcattgggagatcggaggggaaggctctgctagccggccggcttggcgtcggctttcggcttgtcggcagatttgggcttcgcagccggctttgccgccgccggcttgccggcaggctttgcggcggccggcttgtccggcttcgcagctgcggcatccggcttggcattggcgtgacgcacgggcttggccgccggcttgttgtccgacttggcagcgctcttggcgtcgcccttcgcgtcgtcggccgcatcggacttcttacccgcgacgcgggtgtgcttgcccttgccgcgcttgaccggctgcagcttctcggtgtcggcatcgaccgcggcgatcagcgcggcgccggtcttggtcggccccgtgtagaccacgactggctcggacgccgccgccggctgcgccagcatgtcggccggcttggtcggcatcgcggcctgcaggccggaggcgaagaagctcacgccggcgtcgccattggtgctggtgccggcgctggcgacggtgtcctcgccgtcctcgtcgctggccgggcgcttgtgcttggcgccgcacatctcctcgcgcaggttcggcggcgtggagtcgatcggcaccagattgtcgacggtgccgagcgagggccgcagccacgccagcccgttattggcaaagccgcgatcgagcagctgcgcggcgcggatcgcgcgcatccggcccgaggaggcgccgagcaccacggcgatcagccgcttgccgtcgcgcgtcgccgacgccacgaggttgtagccggaggcgcagatgaagccggtcttgaagccgtcggcgccgggatagcggccgatcagcttgttgaagttctgggtgacgcggcggccgaaccggatcgaggggatgtggacgaaatactcgtattccggcaggtcgcggatgatggcacgggcgaggatcgccatgtcgcgcgccgaggtgatctggccgtcggcgggcaggccgttcgggttgacgtagctcgtctgcgtcatgccgagcttttgcgcggtctggttcatttcgccggcaaagccgtcgatcgagccgccgatgccctcggccagcaccacggccatgtcgttggccgacttcaccagcatcatcttcagcgcgttgtcgacggtgacctgggtgccgggccggaagcccatcttggagggcgactgcgacgaggcggtcggcgacaccgtgagcagcgtatcgagcgagacgcggccgtccttgaccgccttcagcgtcacataggcggtcatcagcttgctgagcgaagccggataccacggcatcgtcgcattgtcggcttgcagcaccttgccggtatcggcctcgaccaccagcagcgcctcggcccgtgccagctgcggcgttgcgacggcgagcatcgcgacggccagaatccatttcaacgacgggcgcagcaggcgaggaaaatgcacgagtccggttccggtcctttgagacccgccttcgaaaaaggaggtcttgcgatgtgacgtacgggtttcaagcgtgtccggcgccgctgttgcggcgatgcaaacactataccggcttgccagcagagaacagaggccggccgattatatcgtggacgaaatcggctgaatttcggcagccgcctcaattggaaaggagagaattatggtgtctcgatgccggcgcgcgcctgttcctggaccatgaactgagcccgcgcgagatcggcaaaacgcccgcctttcgccaccagttcatcgaaagttccgctttcgatcacccgtccctggtcgaacagcaggatacgggtggcgtagcggatggtggagaggcggtgcgcgatcacgaatgtggtgcggcccttcatcacttcgtcgagagcggcattgaccttggcctcggtgacggcgtcgagcgcgctggtggcctcgtcgaggatcaggatcggcggatccttgagcagcgcacgcgcaatcgacaatcgctggcgctcgccgccggacagcatgcggccgcgttcgccggcatgggtgtcgaacttcttctcgctgcgctcgatgaaatccagcgcctgcgcgcgcgccgcggcggtgcgcagttcctcgtcggtcgcgtcgggcttgccgacgcggaggttctcggcgagcgaacggttgaacagtagcgcctcctgaaacaccacgccgatgttccgccgcaaagcggtcagtttcagcgcgcggatgtccatcccgtcgatcttgatgatgccggattgcggatcgaacgcacggtgcagcagcgcgatcgcggtagatttgccggcgccggtcgagccgaccagcgcgatggtctggccgggcaatgcggtgaagctgaggtcctcgatcgccggccgcttgccgtcataggagaacgagacgtcgttgaattcgacgagcccggacagccggccggggtcgaccgcgcccggccggtcgcgcaccgccggcaccgcgtcgagcacgtcgaagaattcctgcagccgcggcgcttccatgaacacattgttgatgaagctcaccacctgctcgagcttctggatcagcatggtggcgaacgagacgaacatcacgatctcgccgaccgtggtgagcccctcattgtgcagcgcgatgccgacggtgaagatcgccagcaccgtgatcgtggtcgaggcgcgcgtgatcacggtgaccagcgcccaccatgacagcaccggcatctgcactgcgagcagcttgtcggcgacgtagcgcaggccctgcacctcggaatcgatccgcacgaagctctgcaccagcgcgacattgccgagcgcgtcggaggcgcgcgccgagaggtcgctgtaataggcctcgacctcgctctgcatgccgtaggtcttgcgcaccaccagcgtggtcagcacggtgaacacgacgcagagcgcgaacagcaggatcgcgagccgccagttgatgtagagcgcgagcggcagcagtacgatcagcgacatgatcgcggcgaaatgctcgcggaagaagccgagccagagccgccacagcgcatcggtgccgttcagcatcaccttcatcagccgcccggaatgggtgccggagtggaaggtcagcggcagttgcaggatgtgctcgaaataatccgtcagcaccgcctggcgctggcggtgcgccagccggtcggcctgcagggcgacgatggcgctgcaaccgatcgtgaacaggccgaaggccgcccacgcggccagcagcggccatgccgaggaggtcgcgaacaatccggtgaccggccggcccgacagcacgtcgacgatcttgccgaacagcaccggctcggcgaattgcgcggcggcaagcagcatgttggcgaaggcgaggatccagccgagccgcgcctccttgccgagcagttcgaggacgcgggtatagaggcgaagcatggacatgccggcgggactctcgaacggtggacgcccggtcaggcgggatacaatctaatcagggttcgcgatgcagggccagcggtgacagcgcgtcgtgctcggggtgacggtaattgtggcgagcggctccctacgccgccgtcctggcgaaagccaggagaactcagcggacccacagccatcgaatttgattgagagcgggaaagtggccccagcgtcgcgcaccaacaaacggccggggcaatgggtcctggctttcgccaggacgacgctgaacatttggcgcagctcgtcagttatgcattcgcgtgcgctcaattcaccagccggccgtcgatcggcggcaggaattggtcgtcgaagatgtcggcggtctgcggccgcttctggaatttgacgtcttccgtgagctggtcgagcgagcgctcgaagcgctccgcctcgatgctgccgatgccgttgcgcttcacctcggcggtcaggatgttgtcgcggatgatggcagtgaggcgctcgagctccaggtcgcgcgagccgccatccatccggctcgccacttcggtcgcggcgcgggccgggtccttgatcgcaaggttggtgccgccgatcacagcgcgcacgaaccccttcaccgcatcgggcttcgccgtggcaaggcgcgggctgacgatcacggcaaagccataggcttcgcagccatagtcggcgaagcgcagcaccgcgagatcgtcggcgggcacgccgcgatcgcgtaagttgatcgctgagagataggagaaaccggtcacggcatcgacctggcctgcggagagcatcggctcgcgcaccgcggcgctgatcgtgttctgcttcacgctcgagagcttgatgccgttctgtctcgcgaccgcgggccacagccggatcgagaggtcgccctcggcgacgccgaggttcttgccctccatatccgccagcgccttgatgccgcggctcttgcgcgcgatgatcgcgtagggcgcctggttgaacagcacgaacaccgccttgacgggggcagcgcccggcttgtcgcgaaagccgatcagcgcgttgatgtcgacgagagcgaaatcgctcgagccgtcggcgacacgtgcgatcgcgtctgccgagctggtggcaacgttggtgccgacggcgaggccctccgcgctgaacaggccgccgaccgacgccatcacgaatggcgccgcggcagcgtcaagcggacggtcgagcgtgaactgaatggtgcgcggctgcggctggtcgccggcgtgcgacggcgtcagcgccggccacacgccgcccgagaggccgatcatgccggccagtatccagcggagaacggtggtccgacttacctgcatcgtgacatccgggaggcgagacaaagtgccgcgccggctgcgcgccttgttcatgtcatcgaatgcgccaaggcaacggtcatttcaagctgcaatttcaagcgttattcgaaggcattctgcccaaggcaaggtgaacggccgatgactgccccgatttcaccttgggttgttcagcttgcattcggtttcgggaacctaatttgaggagagtggttagctcaccaaggcccgacgggccggcttccacaaaggatgactgcaatgtttgcgcgaaaaggtgttttttcgtctattggccgcgcagccacattggcaacggttgccgcggtggcgttgacggccgttgagccgacgatggcgttcgcaggctccgctccggcgggcaaggcggccgccgtgaccacatcacacggcacgagcggcgcgacggatatcagcgcccgccgtcggtactatcgtggcggcggtggtggcgcggccgctgccgctgcattcgccggcatcgtcggcacgggccttgcgatcgccgcagcccagagccgtcgcgactactacgactcctacggctattacgacggcggccccggctattacggtggtccggcctattatggcggcccggcctattacggcggcggaccgtattacggctatcacggctattacgggcgccgctcggcgctgccctatacgccgtattgacaggcgtcgtcggttctcggaactgtcacaaatcatccaatccaccggctgcgaggccggtggatttttcgttgtcggctcgcccgttaacacgctggcgacgcgtttggattaggctcgaaggatgagtgattcgatcgaacggctttaccaggcggtgatcgcggcgagggatcttgatccagcgacgtcgcgcacggcacggctgttccagcgcgggccggccaagatggccaagaagctcgccgaggaagctgtcgaggtcgtcatcgacgccatcagcggcaagccggatgccgtcgtccgcgagagcgcggacctgctctacaatctcaccgtcctttgggcctcggccggcgtgaagccggacgatgtctggcgcgagatggagcggcgcgagcggctgctcgggatcgccgagaagctgccgaagtcgccggtcaaggtccccaagggcctgtccaaggccgcgcctgtcccggtggcgcggcgtcgaattgtcgcgctggagaaccggctgcgcaaacggcagccgtaaatcaatccaattcggcccattcccggcatggacaaatccgctccatgatggttcatcgcgcccatgttgaaacggatttatgactggtgcgtcgctgcggccgacaagccctacgcactctggattctcgcggccgtggccttcgccgagagttcgttcttcccgatccctcccgacatcatgctgctgccgatgtcgctggcacggccgaagcgggcatggtggttcgccgccgtctgcaccgtcgcttccgtcgccggcggcgtgctcggctacgcgatcggcgcactgctctacgactcggtcgggcaatggctgatccatctctacggcctctccgacaaggtcgacgcgttccgcgcctcctatgccgagtggggcgccgtgatcatcctggtgaagggactgacgccgatcccctacaagctcgtgaccatcacctcgggctttgccggttacaacatctggctgttcatcctgtgctcgatcgtcgcacgcggcggccgtttcttcttcgtcgcggtgctgctcaaccgctatggcgatgtcatccgcgccgagctcgagaagcggctcggcctgtgggtcgcgctcggcgccatcgtgctggtgctcggctttgtcatcgcattcaagctgatctgaagcgttttcgagcgaagtgagaaaacgcgtcaaagtgactagcctgctgcgtctttgcctgaaggctgcttcaggctacgcttgcagcgatggctgacggaatcaagctcactcctgctgcaaaggcacgcgttgcgctggcgggtcttgcgctgtcgatgacgctggcggctgtcgaccacggctgggcccaggccgcgccgcctgcgctcgccgtccagtcgcctgcgcagcagccggttgaagctccgcagcagcagatcgagttgccgccggcgccggtcgagcacgagaatcccggactgatcaacgaaatcggaaagctgttcgagaagtcgaactggacgctgccgccgctgaagagccccagcgagaccatcgacgatctgacgaacctggcgcgcccttcgacgatggtcaccgggcgtgccgcctgcgtggtggccgcaaacggtgcgcccgattgcaagatcggcgccgaccggctgtgccagagcaaggggttcaaggaaggcaagggcatcgatatcgccacctcggagaagtgctcgccgctggtctatctgccgggccacaagcgcggaccgaacgactgcaagacggaaaatttcgtgacgcgggcggtctgccaatagcagcggcgaagcttgcgtttagagcgtcatgagattggttgaattggatcgacggcggaggttcacctctccccgatggggagaggtgaagacgtgcgtgccgaaccgatccaaattcatcatgctctgggatgccagatgcgcccggaaaatgggctgtttggatgaggttttgtcatccttgttgcggcgccataacgcaatacttgacagtggaaagattgccttgttggtatgacggtcagcattcgagaccaaaccaaacgatcaacttgaggatccgccgccaatgtccatgcctgctctgttcaagggccgcctgtctcttcccgtgatcggggcaccgctgttcatcatctccgtgcccgacctcgtcatcgcccagtgcaaggccggcgtggtcggctcgttcccggcgctgaatgcgcggccgccggaactgctcgacgaatggctgtaccggatcaaggaagagctcgcggcttatgacaaggcgcatccggagcggccgtcggcgccgttcgcggtcaaccagatcgtgcacaagtcgaacaaccggctcgatcacgacatggcgctttgcgagaagcacaaggtgccgatgatcatctcctcgctcggcgcgcgtgaggagctcaaccaggccgtccacggctggggcggcatcgtgttccacgacgtgatcaatcagaagttcgcgcacaaggcgatcgagaagggcgccgacggcctgattctggtcgccgccggcgccggcggccatgccggcacgctgtcgccgttcccgttcgtatcggagacgcggcagtggttcgacgggccgatcgcgctgtcgggcaccatcgccaacggccgcgccattcgcgccgcgcgcatcatcggcgccgacttcgcctatatcggctccgccttcatcgcgaccaaggaggccaatgcggtcgaaggctacaagagcatgatcaccaattcgtccgccgaggacatcgtctactccaacctgttcaccggcgtgcatggcaactatctgaagccgtcgatcgtcgcggccggcatggatccggaaaacctgccgacgtcagatccctcgaagatgagcttcggcaccgatgcgtccggcgagcgcgccaagccgaaggcctggaaggagatctggggctccggtcagggcgtcggcagcatctccaaggtggtgccggcggccgaactgatcggccggttcaagaaggaatacgacgaagcggtcgatccggcgctctgatggagccgatcttccgcgttgacggcgaccgcgtcgtcaccagtccagacgccgcgggtccctgggacccgcggatgcagcacggctccgcgccggcggcgctggtggtgtgggccgccgaagccattccgacgccagtgccgatgcggatcgcgcgggtcacgatcgacctgatgcgtccggtgccggtggcgccgctgacggtctcgagcgagatcctgcgcgacggccgcaagatccagctctgcggcgtcaggttgctcgccgacggcgttctggtggtctcggccaccgtgctgaagatcaagcggcaagcggccgaactgccgtcggacatcgcagcagttcaggtcgagctgccgggccccgacgaaagcatggtcgagccgggcaatcttgcgaacagtccgttcgtcaaatgcatctcgatgcgggccgcgcgcggccgcttcggcgtgatgggcccgggcgcgatctggttccgggtcaatcagccgctgatcgctggtgccgccgtctcgcaggcgatgcgcgcggtggttgcctccgacttctccaacggcacctcgccggcgctcgatttcaaccgatggaccttcatcaacgccgatctcaccgtgagcctggcgcgcgagccggtcggcgactggatcctgctcgacggcgaatcctggatcgggcctgacggcgccgggcttgcgatgtcgcggctcgccgacgtgcagggctatttcggccgggccgtccagagcctggtgatcgagccgcgctagccaggactgcgcttctccgacctcaccttgaagaggcaaatggccgtacgtgcgggatttctgaatattagaaatctatccctgatttgcccgacgtgtcaagttgacttgccgaacgccggctgccgcccgctcctttgcatggggttgttttcgataatttgcggcgcggctgcccttgcggcaaaaataactccgcgccgcgggaacggttggcggcacgaacgagtttcgcccccgttagggggccccatgacgcgtatcgatcccaccgccggcaccgtggtcatcgccacccggcggctttgtgctgtgccggccgctgccgccgcccggccgtcgcagggacaggcgcgatgatgcccggcccgtcctcggaacgcgcggtcatccttgccgcgagcgagcgggacgccgtctggactgcccatctgatcaaggaggccggctactacgccaatatctgcggcgacctcgccgagctcgagcgccaggtcgcaagcggcgccggccttgccatcatcgccgatgaggcggtcaggaccgcggacctcgccggcctggcgcgctggctgaacgcgcagccgtcatggtcggacttcccgatcgtgctgatgagcgagggcggtgggcccgagcgcagccccgaagcggcgcggctcggccgcgcgctcggcaatgtgaccttcatcgagcgcccgttccatccgaccacgctggtcagcctggtcgcggcggcggtgcgcggccgtcgccgccaataccagacccgcgcgatactcgaagacctcaccgagagcgaaagcctgctgcagacggcgctcgatgccggccatctcggcgcgctcgaactgcacataccgggcttcgagctggaggcctcggcgacctgcaagcgcttcttcgggcgcgccgcggacctgccgttcacctatcaggacctgctcgaggcggttcatcccgacgaccgcgcccggcggcaggaggtcgtcgagcacacgctcaagaccggcgccgactacaagatcgagtatcgcaacatctggcccgacggcagtcagcactgggtcgacgtccgcgcccgcgcggtgcgccggccggacggcagcatccggtcgctggtcggggtctgctccgacatcaccgcgcgcaagaccgcggagatcgagcgcgaggcgctgctggcgcagcttgccgccgagcgatccgcgcttgccgagctcaccgcgacgctggagcagcgggtcgagcagcgcaccgccgatctgatgaaggaggtcgccgcgcgcgagaaggcgcaggagcagctccgccatgcccagaagatggaggcgatcggccagctcaccggcggcgtggcgcacgacttcaacaatctcctgatggcggtgatgggcaatctcgatctgctgcgcaagcggttgccggaggatccgcggctgcaccggctggtcgacggcgccttgcagggcgccgagcgcggcgcctcgctgacgcagcggctgttggcattcgcgcggcagcaggatctgcgcgccgtgccggtcgatctcggcgcgctggtgcgtgacatgagtgagttgctcgagcgctcgctcggaccgcgcatcgcgttgcggctccacattcccgacggattgccgccggcctgcgtcgataccaaccagctcgagctcgcggtgctcaaccttgcgatcaatgcgcgcgatgcgatgccggatggcggtgtgatcgagatccgccttgcggcctggcaggccaaaaacgagcagaccaggagcgatcaggcgctgcggccgggcaactacctgaaactgtcggtgatcgacagcggcacaggcatggctccggatgtcctgaagcgggcgatcgaaccgttcttctcatcaaagccggtgggcaagggtaccgggctcggcctgtcgatggtgcatgggctcgcggtgcagctcggcggcgcgctgcagctgtcgagcgcggtgggtaagggcaccaccgcggtgctggtgctgccggtcgcgacggccgcgccggaagcggagagcccggcgcccgcggcgcggccggtcaggcgctcggcggtgatcctgctcgtcgacgacgatccgctgatcgcgatgtcgaccatggagatgctggaggacctcggccatcgcgtgatcggtgccaattccggaccgcacgcgctcgatatcctgaggagcgaccaggagatcgacctgatgatgaccgatcacgtgatgcccggcatgaccggcatcgagctcgccgcggcctcgcgcgaggtgcggccgcagctcctcgtcctgctcgccaccggctatgccgaactgccggacggttttcaggtcgatctgccgcggctggcgaagccctaccaccaggatcagctgcgcgagcggctggatcagctgctgggacagggcgtgaggcagcaagcggccgcggcgggtgccagcgcggatactcttgctgcgcccaccactctctcaccgtcatcctgaggcgccgcgaagcggcgtctcgaagggcgacggcccggctgtcgccgcgatggccggggcgcgctgaaacatcggggccgtgcatccttcgagacggccgctgcgcggcctcctcagcatgacggtggcggtttgtgcgcgcagccgggccctcaccccaccatgcggtcgcggcccgcccagaagcgcgccttcagcaccttcttgtctaccttgccgacgccggtcatcggcagctccttgacgaactggatctgcttcggtgcgtgtgccgagcccttcttcgccttgacgaggccgatcagctcgtcggcgtcgggtgtggcaccctcgcgtgccaccacgacggcggtgacggcctcgccccatttgtcgtcgggcacgccgaccacggcgaccatcgcgacgtcggcgtgttgcgacaggacatcctcgacttcgcgtggaaaaatgttgaagccgccggacacgatcatgtccttcttgcggtcgaggatgaacaggtagccacgctcgtccttgcgcgcgatgtcgccggtgtgcagccagccgctcttcagcgtgtcggcggtgatatcgggccgcttccagtattcggccatcacgtgcgtggcgcgcacgcagatctcgccggcttcgccggtcgcgacctcctggtcgtcctgatcgaggatcttcacctggcaggcggcgatcgggaaaccgcaggacaggaacagttccggcgttttcgggtcatggtccgccttgcgcagcaccgagaccggatagcattcggtctggccgtagagttgcgagaacaccgggccgatccgctcgatgccttcgaccagccggctcggcgacatcgcggacgcgccgtacagcaacagctcgagcgaggagaggtcggcctttggcagcgccggatgatccagcatcacgtagatcatcgtcggcaccaacagcgtgaagttgatcttctcgcgctcgatggtcttgaacaccgcttcaggatcgaacgccttcagcatgtgcacggtgccgccgcgcatcaaggtcggcagcacttttgtacccgcgacatggctgatgggggccactgtgaggtagcgcggcgtctcgggaatctcgaagtcggcgaggatcgcggaggcaaagccgccatattcacggtgatagcgcagcgcgcccttggatttgccggtggtgccgccagtgtagttcagggtcgagatgtcgtcctcgcgggcgaagtttttcgcggtcgcgctgccggcgtcgtcgaccacctgcaacaggtcggcgccgtattccgccgggccgagcgtgaagatggtcttcagcccctgcgccttcgccgcaagctcgccgccgcggtcgcgaaacgtgatgccgtcgacgatcagcatctcggcctcggagtcctcgagctggaacagctggtcgtcgagtgagccgagcggatgcagccaagtgatggcgagccgcgacaattgcgcggcgacaccggcgcaccagctgtcggcgcggttggcggtgagaaaggcgacgcgggtgcccggcgcgaagccgagccgcatgaacacgctctgcatccgtccgatcaggtcggtcgcgccctgatagctgagcgagccgccgggccacgcgaaggccgtacgtgacggataacgcgccagcgcccgcaaggtctgctcgcacgtggccggaaatgcatggagcggattgctcatgtggtggtctcctcccgctttgtgtttggcctcttgcgtgccaatgttggcggcaacgctaacacaatgatgcaaagaagaaacaacttgtccgctgatcttcttgcgcgctttcgcgatcgcctccggttgccgctgatcgcggcgccgatgtttctggtatcaggcgtcgaactggtggtagccgcctgccgcaacggcgtgatcggttcgtttccgacggtgaattgccgtgagacggaacaactcgatgcgtggctcggcgacatcgcgcgccgcctgcgggcgcaagaggatgcaagcggcaaagcggcggcgccgatctgtccgaacctgatcgtgcaccgctccaacacgcggctgcagcaggatctcgtcgtgctgttgcggcacaagcccgagctcgtgatcacctcggtcggctcgcccgcgccggtgctcgcgcccctgcacgaggccggcgcgctggtgtttgccgatgtcgcctcgatccgtcacgccgagcgcgcggtcgcggccggcgccgacgggctcgtgctgctcactgccggcgccggcgggcagaccggctggctcaatcccttcgtgttcgtccgcgcggtgcgcgcattcttcgacggaccgatcgtgctggccggcggcatcagcgatggccatgcgttgcgcgccgcggaagcgctcggctgcgatctcgcctatatgggcaccaagttcatcgcgacgcgcgagagcatggctgatgcgagatacaagcagatgctggtcgatgcgaccgccgacgacatcctgctcacgaccgcgttcacgggcttgcagaccaacatgctgcggccctcgatcgcggccgccggtctcgatcccgataacctgcccgcgcgtggcgcgatcgacatcggcaaggacatcgacatcggtgcccgcgaaagccgccccaagcgctggcgcgacatctggagcggcggtcactccgcttcaggggtgaccggtgtgctcgcggtcgatgatctcgtcgcgcagacgatcgccgagtatgtggcggcgagcgcgcgggtgcggctcggctgatccatcgcgaacggcggccgcttggccgccagaacccgcccgtccgcttaacgcggcattaaccatgccagtcccaactatgcgccagggatggtccgccaatacggccgggccgcccggcagttgtgggaatgcgacatggcttttgaggcgctctccaagaccccggcatcgctcgacgaactccggacccgcgtgttctacgccctgcagcggcacccgctgtgccgccaggtcgaattcgacatcgtcagcacgccgcgcacccgccgcaccaactggacggtcagcctgcaaacggtccagcccggcgccctctggaccgcgcatgagatcgtggcggacatccaggaagcctatgagcttgacgctgcggcctgatttttcgggccgtttcgggacgatttcacctctttggcgcggtcacggcacgctaacgccgcatttggcggccagcttggcggtgacaccggccgggaatggagtaatttttgaccagagccatcaccctcgccgcgctgacatgcttccttctcgccggcgccgcgatcacagcgattttgggccgtgacagcctgccggcggcgcaggccgacgtcggcccggtcgccaatcgcaccagcaagcaggacaagctcgcggtcacgacgcttgtcgccgcctcctttgacgtgcccgccggaccggccgtgacccccgccgacccgtcgccgctgctgctgcgcgcgcaagccgcgataccgggcgcgaccgatagcgtgcgccaagcttacgcgtcggccgagcccgccgatatcggcctgccgaagctgagtgatcccgtcgatgccgcccagccgaagatcgcggagccggtacctgcgccggccgccgccgcgccgccgaagcccaaggctgccgccaagccggcgccacaaaagaactatgccctgctcagcgatgcgcagatcgccgggatcaaggatcggctgaagctgtcgtcgtcgcaggaatattactggccggcggttgagaccgcgctgcgcgccgtcgcccgcaagatccacgccaagcgccagggcgatcccgccgccggcggcatgccgatcgatccggactccgaggaagtgcagcagctgaagtcggcggcgatgccgctgctgttccagcttcgcgaggaccagaagaacgaggtccgctcgctggcgcgcctgatcggccttgagcgcgtcgcctcgatgatctgagcgcaagggtcggtcgagccggctttcagcgggcctccagcggccgcagcttctccaccttgctctgggtctcgaccagcagctgtttcatgaagtccttgttgcgcttcaaccagggctccagcgtctgcctgacatcgcccggtgatttcttttcgatggcctgcgcaagccgcgtctgaaatgttccccaatccttgaacatctccttcaggagggcgtcgtcggagatgttgatcgccgacttgatgtcgccgacggtttcgagctcgcgcatgttgccctgccgcaggatcgaatccaggttttccaggcattcgtggtagcgcgcgagcagatcatcccatcgcttggtggtgaagtcgtcgtccaggttctcaactgcgttgtagagcggctcgagaaacgaccatcggaagcgcctcgccagccgcagcaggatcgacaggaagacgatgtccttcggcatgttctgcgcgaccatcagccttggatcctcgctgaatggcggcatcggcacgaagatgatgacgaccgagaacggcgtgctgtcgagatattcgagccgggcaatgaccggttgatacagcttcaaatcgcggaatatcggactgaggacctgctcgcggcttcgccggctggcaatatccacgtcggcgaacgaattcgcgatgtagcccgtcaactcgtcgagccaggcgccgctgtcgtagcggttttgcgcgctgagcagatcctcccagtcgagatcagccgtatcgggaccggacagcaacgtggtggtggccgcgtccgcctccagtttcgcatccttcagaaagccgcgcgcacggtccgcgggcggcaatgcccgcagcgtttcggccttctgccggaacgacagttcgtcgctgaacacgatgcgcagccgcagacggaacagctcttccgggcgggtgatctgcatgaactgcgcgtgcaggtccttcaccgcttcgttgaagtcgcgggcgtgattggcgttcagcttgggccgcagcggtacggcaccgaaggtcggtcgcacgaacagatcctcgagaaaccgccggacctcgtcgtcgctaattccgtaaaattcattctccgccagcatcggaaacgaaggcgagctatcgaccgagaaccaaagcactttggacattagcttcagcgcgcgcttgtagccgtcgaattgcgaaatctcggacgcgcaccacgtccaattgtgctcggcgttggtgtggatgaagatcaggcagtcggctctcgccgtgttgtcgatcatccactgccgccattccgcgccaccgggaatttcctcgcacacaaagcattccaccgaacgttgtccgtccaggctgctgagatactcgagccgcgccttcagaaggcgcgcgagaaatctgtcttcggcgcgatggctgataaacaccgagaaatcgtttggcatggcaaaatccgatctgcatgaactttatgcgacggccggccgtgtctcgtccgctgaatatcgcggctccatgtctcgccgcggaccgaatgatagcctgtccctggaatttgcggtcattggccgcgaaaaagaaaaaccgccagccagtgaaatatctcactataccttaggatgtgtcatgtgcaacattcccagggaaccggcgcgcgatgcgcggtctgctctgggatggattgactaaagttctcaaaactcggccgatgtgtcgacgggaacgcatcgcttcatttcgcgtccgggcgccgagcgagggcgcgcccaattgagcctttggccgtgatcggtcggctgttgccccgacacccggatcccggcttcgactggagaatcgccttcagttaagttcgtcaccgcgacacaaagatccaatcatcagccgggtgtcacgatgaccacagagcaaagcgccggatcaccgaacatagtggttctcttcagcggtcacatgatcgatgcgccagatcgaaaaacgccacgcttcccgccggacaaggagccggttgcggccgctgcgatcgccgacgcgcttgcgaagatcggtgcggccaagggcgatctcgccatttgcggcggcgcctgcggcggcgatctgctgtttgcggaggccgcgctcgcgcggggcatgcgggttgaaatctacattccgttcgacgagccgacgttccttgccgggtcggtcgatttcgccggcggcgattggcgcgcgcgctatctcgcggcgaaatcgcaggcgacgctccacgtcatgccggacgagctcggtccgctgcccgccggcgaaaatgcctacgagcgtgacaatcaatggatgctggagcgggccgcccggttcggcgacaagaagctcgccttcgtctgcttgtggaacggcgaaggcggcgatggccccggcggcgccaagcacctgatggatgaggccgggcgcaggacgacgtgggtttactggctggatacgaaaaaattatgggactaggagatttcaagaatgccgtcgtgtttcatgatcatgccttacggtcgcaagccgacccaggccgaatccggtcgtgggccggccgaaatcgacttcaacgcgctttgggatcgtgcctacgttccggccatcaaggcgctgggctatgagccggtacgcgccgatcaggacaccagtgcgttgatcgtcagcgaaatgctggagcggatctacttcgccgatctcgtgctggccgacatgacgattccgaacgggaatgtgtactacgaagtcggcattcgtcacgcatcgcaaaagacgggttgcgtgttgcttgcggccgactggtccaagcagttgttcgatgtcgtgcagttgcggaccgttcgctacccgctcccggaaggggagatcacgccagaaaccgccgccgcgatgcaggccgcgatcaaggagccgatcaaggcgcttgccgcggggatttcgccgatgcaccagtcgataccgggttatcccgacaaggttgacccacgcaaggcaataacgatgcgcgggcagctcgcagagcaagccgcgtttcagaccaagatacgcgcggtgcgcgcagccgcggagaaagatcgcatgaagcgtgctgcggagttgattgccgcggagggcaatccgccggcgacctatgcgaaggcgctcgcgttgttgttgctgctgcgcgactgcgtcgacagcaaggccgattggagcttggtgctcgattacatatgcaagctgcctgatctcttcgccaatgagccggaagtgcaggagaatcgtgcgttcgcgcttgctcaagtcggcaaccccaccgacgccatcgccgagattcaaacactgattgattttgcggggccaaccccggagcgtcttggcctgatgggaggccgctataaacgcctcgcagacgatgcctcggacgaggacgatcgccgacagcggcgcgaccaggcaatcgactgctatgaacgaggaatgcggcttgatttcaatgcttactactgctcgagcaatctgcctcggctctatcgtgcccgcgcggagaagggcgatgaggatcttgcacaagatactgtccgatttgcgatcgctgcttgcgagcgcgcgaggtcgctgaagctcgctgacgaatggctgcgcccgaccctgcttgctgcggccttcgatctcggtgagccggacaaggccgaggagttggcggtgcaggtgattgccgaggggcaagcgaagtggaaagtgagcagtgttcttcgcgacctccaggtcagcctccagtatgtcaacgacgaggcaaagcgcgcgcggctgtccgccgtcatcgacaagatcaaggggccaccctcgcgcgctctgccggcatctgcctcagccgagccacatcgatagctcgacgtctccgccgaacggcaccgacacgtaaccgctctccggcgagcgcacccgcgccagatggtcggggctgtaatcggcgttgtcggcgacgacgtaggcgtccggcttcaggcggctctcgacgagatcgaggatgtcgggatagagcgccttggcgccgtcgagcagcaccagatcgatcgcatcggtcggatgtgatcagccggccgtcgccatcgtcgcggccttcatgcgcgaggcattgccgcaaacctccgacgcgatccgcgcgatggccggcgatctgatcaagacgacgctgagcacggtgggccagaatttctcggagagcccgcgaacgcgcgcggagatcaaggcctatgccgacgccatggctgacatgttctgcgcctatctgagcagccaggtaaggcgctgagatgcgccgtctagagatagcgcttggcggccagcaggaagccgagaacgccgccggtcacagcgaaaaccgtcacgccattgcagaagctgacgtaagcggccgaccaacaggaagcagtcgtggagactggcgcggcttttttcgatttctgaggcaagctggtgcattcctgaaaaagcgccgccacctggtcaactcaggtgacggcgcccgtctgagggcttcaggcgaaaccccgcttgagcgtaagccgcgatgatgaacggttcgtataccgctcggcgtcgcacgctcggatgtcagcgctgaagcgaagttccctgaagcgcgatgagattgggtcgaatcgtcatcgcgctttggctctttgttcgagcatgatcttttcggaaaaccgcttcccacttttccggatcatgctctagaactgggcgtaggcgttgcggaacgcgatggcgccggcgagcgaacgcggccgcgtgcgcacggcgtgtccgtcattcccgctctgcacgatccactggccgttctcttgacccacgatcttgccgacgtggtggcgccagacgacgatcgcgccgaccgaagggccgccggcattggtgccgtatcgcgcccaggatcgcgccagattgtattgcggacccgggtcgctgccgacctgcgtgcgcatgaaccagccgcaccacgccgccgggcgaccggaatgtccgtgtgcgtaatgtcgatggttatgatgacggccgcgggcttcggcagcggatgaagcaaaggccaggagcacggcgacagccgcgagagttttacgcattacaaagtcctcttgttgttggcagaccatccgtgttgtgggggaggcgcagcgatgatctgcgatttggttgcgaagcgaccgcagcggccggacgacgcaaaacagaggcgggacatggcccgcccgggcctttaagaaacgggctatggccaaaatatgacggcaaattccgtctggcggccgagatcttgccgaaggcgtcggatgcgggccgtgcgacggcggccatgatctgcgcccgtctcagccgtcgcgtgcggggctgagtccgtcaacgcaacctgcgcggcacgtagcaatgcgtgaccgcattgtctggcttcccatgccaatcttgcggagcatctcagccaaaagctgcacgcttacgcgtctgtgtattgacggctcgcgagcttcgggacgacactgatgccaacaagcaatgagctcgtaggcatctggttgaagttcccggagaggacgccatgtcgaagcgaagcaactcgcgccgcgatggcgcgcccgattccagccgccgcaatttcctgaaaggtgcaacgatcgccggcgcggcagcgctgggcaccccggctgcggccaacaccgcgatgtcagcgtttccggagccgcgacccaaagcggcgccgcccggcgcgaagctcgcggctgcggatgcgatgccgccgccggcagatccggtcaatcagacctcgagcggcggcgacttcatggtcgacgtgctcaagacgctcgacatcgagtatctcgcgatgaactgcgcgtcgagcttccgcggcctgcacgaggcggtcatcaatcatggcggcaacaagaagcccgagatcatcacctgcccgcatgaagagatcgcggtgcatatgggccagggctacgccaagatggaaggcaagccgctcgccatgatctgccatggcgtggtcgggctgcagcacgcgtcgatggcgatgtacaacgcctggtgtgatcgcgtccccgtcattgtgatgggcggcaacatcatggaagccgacaagcgcgcgccgggcgccgaatggccgcattcggcgatcgaccccgcggcgctcacgcgcgacttcgtcaagtgggacgatcagccggcctcgctgcagcacttcgctgaatcggcaatgcgcgcctacaagatctcgaccacgccgccgatggcgccggtgatgctgtcgctcgaccaggagctgcaggaaaatccgatcgagaatcgcgaccgcctccggatcccgaaattcaccccggcgaccccgccgcagggcgacgacgcggcgctggcccagctcgcgaagatgctcgtggcggcagaaaatccagtgatcctgtgcgaccggatggcgcgcacgccggccggcatgccgcggctggtggagcttgccgaaaccctgcaatgcgccgtgatcgacaattacggccgaatgaattttccctcgcgccatccgctgaaccagtcgttccgccgctcgatcctgtcgcaggccgatctgatcctggcgatggaggtcaacgacatctggggctcgctcagcgatttccacgatcgcatcgtgcgcagctcggagccgcgctacaagaagaccgccaagatcgtcacgctcggcacccgcggcctctacatgaaggccaactaccaggatttcggccgctaccaggaggtcgatctcgacatatcaggtgatgccgaagcgagcctgccggtgctgaccgagcaggtgaagcggctggtcgacgagggtcgcaagaccgtgttcgacgcgcgcggcaagaagctcgcggcagccaagctcgccaccgtcgagcaggccaagctcgacgccacgatcggctgggatgcgagcccgatcaccacggcgcggctgtgcgccgagctctacagccagatcaaggacgaggactggtcgctggtcggcacctcgatcggcctcgcatggccgcatcgcttatggaatttcaccaagccgcatcaatggaacggcgtcgccggcggcggcggtgtcggctacaccttgccggcatcgctcggggccgcgctcgccaacaagcggcacggacgcttgacggttgcgatcggcggcgacggcgacttcatgttcgtgccgtcgacgctgtggaccgccgcgcatcaccagatcccgatgctctacatcgtgcacaacaaccgcgcttatcatcaggaatacatgtatctgcaggcgatggcggcacgcctcagccgcggcatcaccaacgccgatatcggcaccacgatcaaggatccgttcgtcgactatgccaccctcgccaagggcttcggcgtctatggcgaggggccgatccgcgatccggatgcgctggcgcccgcgctgaagcgcgcgatcgcgatggtcaagagcggccagccggcgctgctcgacgtcgtgatggatcagcggtgaagcgggggtggcagttatgaccatcagtcgaacgctgaagcgccttgcagccgtcgcggcgatcgcgggagctctcgttgccggcgtcgtcacatcgcgcgccgaggacgcgccggccggcgatcccgtcaacggcaagcggctctatcttgccgacggctgcttcgaatgccacggccgcgccgggcagggcggccgcttcaactatctgacgccggcgctggcgcagatcgcgctgccggtggaatccttcatcgccttcctgcgcgaggcgccgaacgacatgccgtcattctcggccgacgtgctgtcggacaaggatgccgccgacatccacgcctatctcagctcgctgccgggaccgaaggcggccaaggacattccgccgaacctgaaccagtgagggatctccgccccgcacggtggcagctcatttcatgtgttcaagttccggcgtacgccgctcgggcgcttagctagacggctgtctcgtatccgatgtcgaaatcggaagcggcatatccgccgcgcatcgcgacattctcgcgcgacacttcgatcaggatgatcttgacgtcgttagccgggacaccgaagctttgcagcctgtccacgatggccttgtagagcgtgcgtttggtcgcgatggctcggccgggaaacatcgtgatctcgatatgggtgaagcgttcgctcgcccaatccggaatcgcgaagttctcgtgtgcatgctgcacgagccgaagaatcttgtcgtgtagtggcgttctgagtgttgtgctgatcgcgtcctgaatggcggacaggaactggtcgcttcggccggcgagccagccttcccttgtctcgacgagaacgtcaggcatgttggtccccttttgggctgcaagccgattgccgaagttcgagcaagcgtatgggacgcggcggcgttcacaattcggatgttccgatgccgcgcttcgatcgtgccgaagttcgcctgcgatcgcgttctcgtcattttggtgaggtcgcgcgtaaccgcgtcggacgccagccggggtcttcatctccacgctgaacgttcagtaaaatgccaaactaaacatcaagccgagccggccctggtgtttttcgccatccggcattgctgcattgcggtggttcgtgcaggcatttatggcgatctgtccatcatcgtttctcgtcagaaaccggcttgacgggttccggaatttagtaatacgtttagtattacaagaacgataaacatcacgcatcgagccgatgtgtgggaggagcccagcccatccggaccgcaatgtccggatgcgtttcgtctcgctctccatcatcgctcatcaactcggtttcggagtgtcggcgtcaatccggcaggatgcgccgagcgggtcaggtgcttcaacgatagggaggaaatggattatgcgaacattgggatggttgcgtagtacggcggcgtccgcggtcgttgcggtcgctgcactcggcgttctcggcggcgggcaagccgcggcgcaaggcaagcagctcacgctgtgctgggcggcgtgggatccggccaacgcgctggtcgagctcggcaaggacttcaccaagcaatccggcatcgagatgaaatacgagttcgtcccctggacgagctacgccgatcgcttcctcaacgagctcaactcccacggcaagctctgcgacctgatcatcggcgacagccagtggatcggcggcgccgccgagaacaagtggtacgtcaagctcaacgacttcttcgacaaggagaagatctcgatggacgacttcgtcccggcgaccgtcgtcggctattcgcaatggccgaagaacacgccgaactactgggcgctgccggccatggccgacgcggtgggctggacctatcgcaaggactggttctcgcgacccgagattcaatccgcgttcaaggccaagtacggccgcgacctggcgccgccgaagacctatgacgagctgaagcaggtcgccgagttcttccagggccgcgagatcgacggcaagaaagtctacggcgcctacatcttcaccgagcgcggctcggaaggcatcacgatgggcgtgaccaacgtgctgtacaattacggcttcgcctacgacaatccgaagaagccgtaccagatgcagggcatcgtcaattccgccgacgcggccaaggggctcgagttctacaaggagctctacaagtgctgcacggcgcccggcatgaccaacgcctacatgcaggaaggcctcgatgccttcaagtccggccaggtcgcgatgcagatgaactggttcgcgttcttccccggcctctacaaggatccgaatgtcggcggcgacaagatcggcttcttcgtcaatccggccggcccgaaggggcatttcacccagctcggcggccagggcatctcggtggtggcaacctccgaccacaaggacgacgcgcttgcctacatcaagtggttcgcgcagcccgccgtgcagcagaaatggtggcagatcggcggctattcggcgttgaaggcggtggtcgacgcgcccgagttcccgaagagcgcggcgttcgcgccgcaattcctggagtcgatgggcatcgtcaaggacttctgggccgagccgtcctacgcgcagctgctgctcgacatgcagaagcgggtgcatgactacgtcgttgccgacaagggcacggcgcagcaggcgctggatctcctggtcaaggactggaccaaggtcttcaaggagcagggcaaggaagtcgcctcgcaatagaagcccacactccacctgaaccggcttcctcgagggccgcccccggggaagccgaaccagcccagccgatggacacgatgacgacgatctcgcaacccgatcatgctacgatgccaggcgtgagcacgcctgttaaatcccgcgacgcccggcgcgtccgcggcctgtctgaccgggccattgcttggctgttcgtcgcgccgacgatcgcgctgctgctcgcgatcaacatctttccgctgatctggatgatccggctgtccttcaccaacctcaacctcagtatgtcctatctgccgctgcggttcgttggtctcgacaatttcagggacatcctcaccgacgaggatgtctggttccggctgcagaccacggcgcagttcgtgatctcgtcggtggcgttgcaggtggtcgtaggcttcggtcttgcgctgctgatcaaccggcagtttcgcggccacagcttctggaccacgatcatcctgctgccgatgatgctgtcgccggcggtggtcggcaatttctggacgctgctgttgcagccgcagatcgggccgttcaattatctgatcagcctgttcacgggtgtgccgccgagctcgttcagcatgaccgggcaggtgtcgctcgcgccgtggaccatcgtgctggtcgatacctggatgtgggcgccctacgtcatgctgatctgcctcgccgggctgcgctcgatccccgattacatctacgaggcggcggaggtcgaccgtgcctcggcctggcggcagttctggtcgatcacgctgccgatgacggtgccgttcctgatgcttgcggtgctgttccgcgccatcgagaacttcaagatgttcgacatggtcaatctcctgacctccggcgggccgggctcgaccaccgaattggtgtcgatctcgctgaagcgcgcggcgttcgagaagtggcgcaccggctattcctcggcgctcgccatcatcctgttcgtgaccgtgttcggtgccgccaacatctacgtcaagacgctcaacaaggtgaagcaacgatgaccgctgccgccaccagatccaccgcacattcgatcgtcgaagcctcgccgcggaccaaggcgttcgccggcggcctcgtcatcctctacgccgtgatcacgatcctgccgctgctgtggatcgtcgccaccgcgttcaagtcgcagagcgatgcgatcgcctatccgcccaaggtgatcttcgagccgaccctcgaaggctatgtcaacctgttcacggtgcggacgcgccagacgccggacttcatcgccaagctgccgccgcccgagacatggtacgaccagctggtgcgcaagcgggacatggtgatcgcaggtccctcgaaggtcgtgccgcgcttcgttaactcgctgatcatcggtttcggctcgaccttccttgcggtcttcctcggaacgctcgcggcctatgcgttctcgcgcttccgcattccgctggccgacgatctgctgttcttcatcctgtcgacgcgcatgatgccgccggtcgcggtggcgatcccgatctatctgatgtaccggcagctcaacctgaccgacacgcggctcggcatgatcctgctctacaccgccgtgaacgtctcgcttgcggtctggctgctcaagggcttcatcgacgagatcccgcgcgagtatgaggaggcggcgctggtcgacggctatacgcggctgcaggcgctgcgcaaggtggtgttgccgcaggccgtcaccgggatagcggcgaccgcgatcttctgcctgatcttctcctggaacgagtatgccttcgcggtgctgctgaccagcggcgaggcgcagaccatgccgccgttcatccccttcatcatcggcgagggcgggcaggactggccggcggttgccgccgcgaccacgcttttcgtcgtcccgatcgtcatgttcaccgtgctgctccgcaagcatctgctgcgcggcatcaccttcggagcggtgcgcaaatgagcggcgctgtggccaccaagagtggagtatctcgctggtttcgtcgcgggccgtgggaggccgtcgcgatgaccttgatcggtggcggcatcatcatgctggtgcagccgtggtcgatcgatctctacagctactccttcgcgacgatcctggccggcacggtcggcttcgtcatcgtcagccattttccggaatagggccatggcacagatccgcatcgagaacctgcgcaagtcgttcgatcagttcactgcggtggaaggctcgaccttcacgatcgacgacggcacgttcttcgcgatgctcgggccctccggctgcggcaagaccaccaccttgcgcatgatcgccggcctcgagctgccgaccgaaggcaagatcctgctcgacggcgaggacgtcacgttccaccgcgccgcagcccgcgatatcgccttcgtgttccagctgttcgcgctctacccgcacatgaatgtcggggagaacatcggcttcccgctgaagtgccagggcatggcgaggcgcgagatccgcgagcgggtgcaggagaccgcgcggatgctgcggatcgagcatctgctgtcgagcaagacctcgaaactctccggcggcgaccggcagcgcgtcgcgctcggccgcgcgatggtgcggcggccgaaggcgttcctgatggacgaaccgctcggcgcgctcgacgccgagttccgccatctgatgtgcggcgagctgcgcgacctgcacgatcgcatcaaggcgaccaccgtctatgtcacgcatgaccagctcgaggcgatgtcgatggccgaccagatcgccgtcatgaacaagggacgggtcgagcagatcggcacgccgcaggaggtctacgaccggccggcgagcatgttcgtcgccgatttcatcggctcgccgccgatgaacttcctgcgcttcgagggcggcctgcaatccggcgatcgcgccgtcagctttcatgacacgaggctcgcggtgccggagatccgcgaggatcgcgccagcgcaccattggcgctcggcgtccgtccggagcatatccgcttcgccgacgctggcgccgtgcgcggcgaggtgttcggcgcggaatatctcggcaccacccagatcgtcaccgtcgacaccgcctatggccgggtcgcggcgcggctgccctccagcgcatcggtgcggatcggcgagaccatcggtcttgaattcaacgccgagcggctggcgctgttcgacatcggcagcggccttgcgatcaagaccgccagcaaggagagcccgcgccatggctgacgtcaccctgcgcaacgtcaccaagcgcttcggcgcggtggaagcggtccgcgacctctcgctgacggtgagcgacggcgagttcctggtgctgctcggaccgagcggcgccggcaagaccacgacgctgcggctgatcaccgggctcgaaagcccggatgcgggctccgtgatgatcgacgggcgcgacgtgacgcacgatccgccgggctcgcgggacatcgccttcgtgttccaacaatactcgctgtatccgcatctcacagtctacgacaatctggcgtttccactgcgttctccggcgcggcgggtggcggagccgatcatccgcaagcgcgtcgagcagaccgcggagctattgcatatcgcaagcaagctgaacaaccgcgccacccggctgtccggtggcgagatgcagcgggtggcgatcggccgcgccctggtgcgcgatccctcgatctatctgatggatgagccgctgtcctcgctcgacgcaaaactccgcagcgaacttcggctcgaactcaagcggatccagatcgagctcggcgcgactattctttatgtcacccacgatcaggtcgaggcgatgacgatggcctcacgcatcggcgtgatcaaagacggccagttgcttcagctcggcacgccccgcgagatctacgaaagcccgtccagcagctacgtcgcctcgcggctcggcacgccgcagatcaacttcctgccggcgcgactgctctccgatgtggcgatgccgcagggaaccgagacggtcggcattcgcaccgagcatcttcagctcgccgcgcgcaatggcgggcggatggtcgcccgcgtgcatcgggtcgagcacctcggcgagcagaatcatattcatctggactataagggcgagacgctggtgacgctggcggatccgcatcagccgctgcaggccggccaggaggtcgatttgcagctggtgcatccgttgtgtttcgaccgtgcggggcagcggattgccgcggcggttcattagaggggcgagaggatcgaagagatgtcgttgccatctgagacattcaaatcgttggtcaaggcggccgcagagcaggtcatcgccagcgcgccggagctgacgagcctcgatcaggcgatcggcgacggcgaccacgggaccaacatgaagcgcggttgcgaagccgtgctcggcaaactcgacgccatctcggcgcagccgctcgacgaggcgttcaagatgatcggcaagaccctggtgatgacggtcggcggcgcctccgggccgctctatggcagcttctttctcgccgcgggcgaggcgctctcgcacgacaagcagctgcccgacgatctcgccgatgtctttggcagcgccgtgaacgcggtgagcgcgcgcggccgctcgcaggtcggcgagaagacgatgctggatgtgttggtgcccgtgctggagacgctgaagaccgcggccggccagccggatctgatcgcgcgggtccgcgctgcggcgaccgatgcagtcgaacgcaccgcgccgatgcaggccaccaaggggcgcgcctcgttcctcggcgcgcgcagcgtcgggcatgtcgatcccggcgcgcggtcgagctgtgtgctggtgcaggcggtgtgcgccggcctggaggcacgggcatgaccgagaccgtggggatcgtgatcgtctcgcactcgagcgacatcgccaagggaactgccgacatggtgcggcagatggtgggcagcgaggtcaaggtggcgttctgcggcggcaatcccgacggcggattggggaccagcgtgccgctgatcatcgacgccatcaatgccgcctggtctcccaagggcgtcgcggtgctggtcgatctcggcggtgccgagaccaacagcgaaatggcggtcgagatgctggagccggcgcggcgcgatctcgttgtcgtctgcaatgcgccgatcgtcgagggcgccgtgatggcggcgaccgaggcggcgggcggcagctcgctggcccaggtcaaggcggtggccgaggaactctctgccgattgaaatgtcggcgatgcgatgatggatgatgagtatgcttgataaagcggacggacagatcttcaccggcaatgtgcggctggtgcatgcggtcggcatgcacgcgcgcccggcggtcaagctgaccaagctcgccaagaagtaccaggcccagatctcggtgcgcgtcgccggggcgcccgaatggatcaacgccaagagcgtggccaagatcatggcgatgcgtgccgcgcacggcagcacgatcgagatcaaggcctccggcagcgacgccgaggccgccgtggctgcgctggtcgatttggtcgccagcgatttcccggatggagcaggctagcatgcagggcggcgctgcaggatcggcttaccgcggcaggaccgcctcgatcggctttgcccatggtccgctggtccgggtcgatgcgggcgcgggcggcgagcgggtggccggcacgctggtcgaggaggcgctcgcgctgcgcaaggcgatcgatctcgccagcgggcagatcgccgatcttgccgccagcgccggcggcgaagctgctcagatcctcgaattccaggtcgcgctgctggaggacgaggacctgatcgaggcgatcttcgcgtcgatcggcgaaggccggccggccgatgttgcctggcgttcgacgctcgacgagcagatcgcggagtacaattcggcggcggatgagtatctgcaggcgcgctcgtcggaccttgccgacctgcgcgaccgcgtggtccacatcctgcgtggcgacgcgggcgagccgctgaagatcccgagcggaggcgtcgtctgtgccgacgacctgccgccgtcgcgcttcctggagatcgactggtccggtggcggcggcctggcgctgctgcacggcagtccgaccagccatgtcgccatgctggcgcgggcgcgcggcatcccgatggtggtgcagctcggcgccattccggatgccggcgccacggcgctgctcgacggcgaaggcgcgacgctggagctcgatcccagcgccgagcaggtgcgcatcttcgagaagcggcgcgagagccatcgcaagagccgggcatcggcccgcgcgatcctgcggcggccgacggcctcgtggcgcggcgagcacatcaagctcctgatcaacatccagcgcgtcgacgacctcgaacatgcggatgcgcaatacgccgacggcatcggcctgatgcggacggaattcctgctcgccggacggagcgagctgccggacgaggagacccagttccaggcctatgacgcggtgttgcgctgggccggccagcggcccgtgacgatccgcaccttcgacgccggcggcgacaagccggtgcccggcttcaccttcgacggcgaagccaatccgttcctcggcgtccgtggcttgcggctttgcctcgcccggcccgagatctttgccgttcagctccgcgcgctggcccgcgccgcggtgcgcggcaatctcaaggtcatgttcccgatggtgacgcaggccgacgagctcgaggcggggcggaagctgttcgccgacgtcgtgcagcgcttgcaggcggacggcattgccgcgatgctcccggagctcggaatcatggtcgaggttccggcggcggccctggcgatatcgagcttcaaggcggcattcttctcgatcggctcgaacgatctcgcgcaatatgttttggcttgcgatcgttccaacggagctctcgcccccctgatggaccccctgcatcccgcagtgctcgaactgatttcgcggaccgcggagcacggccgccgcgctggaataagcgtcagcctgtgcggcgacatggccggcgatccgcgctgccttccagcgctgctgaattgcggcctgcgcgaattgtcggtgaacgcctcggcactggcgcagatcaagcacaccatcgaccggctgagcagcggaggcagtgttggctgacacggcggcggatgaagcacccgaagccggcgcggttgcggcctacaagcgcatcttcaaggaagtgcttgagagccgcccgtcggggatgcggctgcgtctggcgcatgccatcggcaagaaccgcagcttcgtcagccagatcagcaacccggcctatccggtgccgatcccggtacagcatctcaacacgatcttcgatgtctgccacttcccgccgcaggcgaaggccgcctttctgcgcgcctatgcgcgggcgcatccgcgccgtgtcggccggctgagcgagggatcgcacgagcggacgctgacgctgcatctgccggatctcggcagcgccaagcgcaatgccgagctcgacacgctgctgcaggaattcacgcggcgcctgatcggcatcatgcgggaaaaataggcgagaacgccaccaaagcgttttcgagcgaagcggataccggttcgcgtgaagaaagcgcgtcaaaacaagaatctggagcttcgttccgattgatcggaacgaagcttcggacgaagcggggaggacaccatgaagaagttcatcaatgcggtcgacaacgtgctcgccgagagcctcgatggctttgcggccgcgcatgccgatctggtcgcgctgggcgccgagcgcaaattcgtgcgccgccgcgagccgaaccgcaacaaggtcgcgctggtctcgggcggcggcagcgggcatgagccgctgcatgccggcttcgtcggccacggcatgctggatgcggcctgtcccggacgggtgttcacctcgccgacgccggaccagatcgtcgaggccgcgcaggcggtcgcgggcgatgccggggtgctgttcatcgtcaagaactatgccggcgaccgcatgaatttcgagatggcggccgagatcgccgaaggcaagaccgccaccatcgtgaccgatgacgacgtcgcggtcgagaaatcgacctacagcatcggacgccgcggcgtcgccggcaccttgatcgtcgagaagatcgttggcgctgccgccgagaagggcgccgatcttgcgacctgcgtcgcgctcggcgagcgcgtcaacgcgcggacccgttcgatgggcgtggcgctgaccagctgcacggtgcctgccgcgggcacgccgaccttcgcgctcggcgaggacgagatggagatgggcgtcggcatccacggcgagccgggccgccgccgcgtcaaactcgcagcggccgacgcgatcgcatcggagatgacgacagccattgcagaggatctcgcggcccccgccggctccgaggccctgctgctggtcaacggcttcggcggcaccccgacgatcgagctctatctgatgtacaacgccgcgcgccgcatgctcgagcagcgcggcctgcgcatcgtgcgctcgctggtcggcagctacgtcacctcgctcgacatggccggctgctcgctcacggtgagcctgctcgatgccgagacgacggcgctgtgggacgccccggtgcgcacggccgcattgaaatggtgaatgctgccatggtcggcagccacgagcttcgttgaaccaatccgccttcgccaaggctccggggcgacagccttcgctgcttcgcatcgatggaagcgcgtcgggcttgccgagccgtagctgcgaagcaacgaaggctggtgcccctggccggaatcgaaccagcactccttgcggaactcgattttgagtcgagcgcgtctaccagttccgccacaggggcattcgcgatggtccaggccgggagcggccgggggtcacgaagcgcggcggactatagcgggcggcccgtcacggtcaacccgcgcggatgtgattgtcccgtgcctcgacagcggtattttcacgcgatacgacccggatcgagcatggagcggggccatggccctcccggatgatgctcgcaggaggaccgccgtgacgaccgccaccgcccatccgtcgcatgcttccgccaccggcaatcctgcgctgacctcggccctggcgattgccgtgatcgctgcggcgacgctggccggcgcctggttcttccagctggtgctggagatcatgccctgtccgctctgcctcgagcagcgctatgcctattatctcgcggtcccgctcggcgccctggtggcgatcgcggccgcccgcggtgcggcgcgtccggtgctgctcgccggccttgcgatcctcggcctcgccgcgctcgccaatgccgggctcggcgcctatcacgccggcgtcgaatgggggctctggcaggggccgaccgattgcaccggcccgatggtggatttcggcaaggccggctcgctgctggatcagctcgacaaggtcaaggtggtccgctgcgatgaggtgcagtggcgcctcctcggcatctcgctcgcaggctacaacgtgctgatctcgctcttgatggccgcgatcgccggctggggcgtggtgcgggctgcgaaggcctgaggtccaaccgcccgcttcccgtgatccgtcatgctgaggaggccgcgtagcggccgtctcgaagcatgcgcggccaaaagccgggctgttcatccttcgagacgcgcttcgcgctcctcaagatgacggaccagctaagctccacctaatcgtcgacgtcgtcctgcggccgtccgaacagatggataatgcccggcgtcgagatggtgacgaacagaaacctcgacaggtgatgcgcgccgacgaagatcgggtcgatgtgcagcgtcagggccagcgccagcatcgcgtccatcgcgccgggcgcgaaggcgaccacgacgtcggcaagccgtacatgggtggtgaagccgatcaccgcgacgaacacggccgatatcaggatggcgatcgcaaacgagccgagcccggcattgacgtggctgagcagggtcgaggtcttcatccgcgcgaaacgggtgccgatcagcgcgccgatgccgaccagcgcgacattgcggagccagggcggcaggccgccatcgaccaggcccgagccgtgcagcaggctggaggcgagcatcgcgccgaacatccagctggctgggaatttgatccagcgcaacaggagtgagacgccgatcgatccggcgacgagggccgtgaggccgaacggcgaggcgaccgtggtcggcaatggcggcggcgccgcatgcgtcaccccggtcagcgccagcaccagcggcagggccgcggtcaggatgatgacccgcatggtttgtaccacggcgatcgccgcgacgtcggcgcccttctccgcggcgaggatcgtgatctgcgagagcgcgccggggctgccggcgaggaaggccgaggtctggtcccagccatggacacgctggaggtacaggctcgagccgaaggtcgagcagaatgtcgcgagcgccaggagggcgatggtgagcggataggagctcatatgctgcagcaattgctgcgacatcagcgagcctagcgaaatgccgagcagcagcagcaccgattgtgtcagcaccggcggcaccgcgagcggccggccggccagtgcggcgatcccgactgcgcacatcgcccccgagatcaggccgcctggcaatcccgcccacaaaaacagcacgccgcctgcggcgccgatgacgagggtctcgagcccgttcagaactttgctgcggtcgggaatggccgttgccatcgaagcgcggatcagggtcacgccgccttatggcaaattcgcaaccacgggacaattgcatctcgcgattgcagcattgcgtccgaaaacgcgggcactcttccttcatcctgccctggagggggagagtcgcttcgcacgaagcgaagcgaatcgcacatgacgatcgaatggcaacgtcatcggcggtcggctccctctcccgcttgcgggggagggctggggtgggggctctttccgcgcaatgactcgcggagagagcccccacccgccgcgcgccaggcgcgcgtcggcctcccccgcaagcgggagaggcaaggaaactcgcggagaatctccgcacacgtcatatgtgattgccctgccctccaggggagggggcagcgttagcaatcctacttcgtgcccgcgggcgcggcagcggcgccgccggacttttccttcttgcattcggaacggaatttcttgcgctccttgccgtgcaggcccttggcgtcggcctccttcgagcattcgatcgattcggcggtgtgcggcttggcttccttgggtgccttggccgcagcggccgccggagcggcgtccttggcggcgggcgcggcggtttgcgcgaaagctccgcccatcagcagaaaggaagcaacggcggttgcggtcgcgagcgaggaaatcttcgtcatggggcacctcatgaggggaaagaggccgaaacgtcgcgcggcgatgctgaaccttggatgaacatgccgcggtcccgccgccacaatattttagcgcccaggcgcgcccgcacattgtcgcaagtcggggttgcgctaggataatggtcttacgccgatgcccccacgggaaaccgacgggaaaccagggatgacgggagaccagggatgaccattcagaccagactgttgtgcgtgattgcggtgtcgggctttgcagcctttgcggcgagcgcgccggcgcaggccctgaccgcgcaggaatgcagcgccaagtatcaggcggccaagtcggccggcaccctcaacggccagaagtggaacgacttccgcaaggctcagtgcgccgccgacgcgaccccggctgcggcccccgctgctgcgccgccgcccgctgccgccgcgcctgctccggccgcgccgaaggaagccaagcgggaagccgctcccgcggcagcacccgccgcgccgtcagggcccgccgtgtttccgaacgcggtcgatcccaaatacgccaaggaaaccgagggcaagcagcgcatgcacagctgcctcgatcagtacaacgccaacaagaccaccggaggcaatggcggcatgaagtggatccagaagggcggcggctactacagcgaatgcaacaagaagctcaagggcgcctgagcccggccggagctgacgtttgacgagcggccggcgcaagccggccgcttttcgttgacgccattgctattggccttcggccagcagcttgtccgccgattgcgccagcagttgcgcgcgcttgcgcggaccgcgctcgaggaacaagaggctctggccgaagatgaagcagtagaacaggaaggcctgcgcatcggccgcttcggttggcagcccggtggcgcgatagagctggccgacctgcttcagccgtgccgcatcgacactcgcggcggctgcggcggcggcctcgtcggtgcgcgcccattgccggatcgcgagctcgaccgccatcgcctcggtgttcatgcgctccgaatagagcgtgatgatcgccttcaaccgttcgcgcgcgctcgcaccgtcgagcgcggtctgcttctcgatcgcggcgacgcggccatcgcgccagcgcgtcagcatggcctcgagcagcgcggcgcgatccttgaagcggcggtagaagccgcccttggtgacgccgagattcttcgccagcacctcgacccgcacgccgtcgacgccgctatgggcgagttcggcaaagccggcggcgacccagacatcgcccttgccttcagtcatgtgatctccgcggagcggccttgatacggtgccgtattgctagcccgcttcctccctgatacgctaccgtatcaaaatcgagggaggcgacgatggagggcgaggcgacctatcgcggcacggtctatccctggcactgcgaccatatcggccacatgaacgtcatgtggtatgtcggcaaattcgacgaggcgagctggaacatgttcgcgcggctcggcctgacgccgagctatctgcgcgagtccggccgcggcatggctgccgtgcagcagaacattgcctacaagcgtgagctgcttgccggcgacctcgtcgaggtcaagagccggctgatcgagttccgcgacaagtcgatccggatcctgcacgagatgcgcaacgccgaggccggtgagatcgccgcgtcctgcgagatcaccgccgtgcacatcgaccgtgccgcgcgcaaggcggtgccgtttgcgccggcgatccgctacgcggcgatgccgcatctcgtcccgtcagaacccgtgatcgcatgaccgccccgccccgcttcgagccgaagaatcccgattttcgcgcggttgcggccgagacgttcgtgcgccagcacgcgatgcggacgcttgggatctcgatcgcgcgcatggagccgggcgaggtcgatctcgcgatggcctatgcgcccgagttcacccagcagaacggcttcgtgcacgccggaatcatcaccgcgggcctcgacaatgcctgcgggatcgccgccttcacgctgatgccggaaggctccgatatcctcaccgtggagttcaagaccaatctgctggcgccggcgcgcggcgagcggttcgtgttccgcggcgtggtgatcaagcccggccgcacgctgacggtatgcgagggccgtgcctatgccgtgcaggatggcgtggagacactggttgcgaccatgagcggcacgctgatggcgctgcagcggcgggcggggtagctcgagcgcagaacacaacgccgtcattgcgaggagcgatagcgacgaagcaatccacgcctccgcttgcggggctatggattgcttcgcttggctcgcaatgacgcgactatgtgcagccccgcgcattgacaagcctccgtcgcaccgacctgataggtggatgcatcgcgtgagcccctgtcatgatcgccagcctcagtctgatcctgctctgccagctcatcggcgaggtcgcggtgcgcgcgctcggcgtaccggtgccggggccggtggttggcctcgtgctcctgttgttgctgctgctggcgcgcgaccgctatcctgcgctggcgcgcgggccgctcggcaatgacggcgtcgaaagcgcaagccgcggcatgctcgccaatctgtcgctgctcttcattccggcgggcgtcggcgtggtgcagaagctggatctgctcgccgagcacggcatcgcgatcctggtgatcctcgcgctatcggtcatcgtcacgctgctggccacggtcgcgaccttcgttgcggcgagcagtctgttctcgcgcgaggaggagccgtgagcggcaatccgttctcgctctgggtttatctctcccagtcgccgctgctctggctgacggtgacgctgctgacctatgcggcgaccgatgcggtgtcgctgcagacaaggcggcatccgctcaccaatccggtgctgcattcgctgtggatcatcggtctgttcctgctgctgaccgggacctcctacaccacctactttgccggcgcgcagttcgtgcacttcctgctcgggccggcgacggtcgcgctcgcggtgccgctctacgagaaccgcaagcgggtcgcagcggcggtgctgccgatgctggttgcgctcgcggttggctcgctcacggcgatcgtttcggtggtgctgttggcgaaggccttcggcctgccgcgcgatatcatcctgtcgctggcgccgaaatcggtgacggccggcgtcgcgatgggcatcagcgaatcgctgcatgccgatccctcgctgaccgcggtgtcggtgatcctcaccggcatcatgggggcgatcatcgtcacgccgctgatgaacttcaccgggattaccgactatcgtggccgcggctttgccgcagggatcgccgcccatggcatcggcaccgcgcgcgcctttcaggtcgacgaggtcgcaggcgtctttgccggcatcgcgatgagcctgaacgcgctggtcacctcgctgctggtgccgttggccgtgacatatctgctgcgctgagtgtcgttgcagggcagttttgtgctattggtatggcgcaatatagtaaatcattctatgatgccggctcaaacgcgagtctgctccccttggtcttctccgcaacccagagcgtgcttgggctggcatcgggcatgctggtcggtttttcgctgggcctggtcggtggcggcgggtcgatccttgccgtgccgctgatggtctatgtggtcggggtgccccagccgcatgtcgcgatcggcacctcggcgatcgcagtcgccgccaatgccgcgatcaacctctccaaccacgcccgcggcggcactgtgatctggtcctgcgcactggtgttcgcgctgtcaggcatgttcggcgcgttcggtggctcgatcctcggcaagatgctggacgggcagaagctgctggcgctgttctcggtcgtgatgcttgtcatcgcgggcctgatgctgaagacccgcgcgcgggtcgggctgaccgacgtcaagatctcgatgtccaacacgcccgcaatcatcggcctcgggctcgtcacgggaaccatgtccggctgcttcgggatcggcggcggcttcctgatcgtgccggccctgatgctggcgaccgggatgccgatcatgaacgcggtcagttcctcgctggtggcggtcaccgccttcggcgtgaccacggccctgagctatgcgtggtccgggctggtgtcgtgggaccttgcggggctattcgtcgccggcggcatcgcgggcggcctgttgggcacccgcagcgcccggcacctgtcggaacggcgcggtgccctcaatatcgtatttgcgactgtgattatcgtggtggcgatctatatgctgctgcgtaacatcaatgtgtcctgaacgtagaagggcgaggagcccttccggaagccagccatgaaccatctgacgaaatcacccctcgacaacgccggcgccacccgccggggcgcgctcggcctgatcggtgccggcatcgcgcttcttgccgccggcggcgcgcgcgccgaggacgacaaggtcctgaccgaggagcaggtgctgcgcgatcccgagattccggtgatcggcaatgccaagggcgacatcacgatcgtcgaatggttcgactacaactgcccgtattgccgcaagctcgcgccggagctccgccaggtggtgcaggacgacggcaaggtccgcctggtgctgaaggactggccgatcctcgggccggtctccaaggtggcggcgcggatggcgctggcggcgaagtaccaggacaagttcgaagctgcgcatgaggcgatgatctcggtcaattcgcgcatcaccgagccgcgcatcgccgagctgctctcgggcgccggcctcgacatggaccggctgaagaaggacctcgacgccaacgccaaggcgatcgacgcggtgctttcgcgcaacgaccagcaggctcaggcgttcggcttcaacggcacgccgtcattcatcgtcggcaagtaccgcgtgcccggcgtgctcagcatcgaccagttcgagcaggtgatcgccgacgcccgcaaggccaatatgggccgcaagaccgagcagaactaacgcgagttcttgcgcttggcataagcgcgccgggcgcgctcgcgattgccgcagacttcgctcgagcaccatctgcgggtctggttcgggctttcgtcgacaaagaaccagccgcagccgtcggcctcgcagcatccgatccgcctggcgtcgtcggacgccagcagtgccgtcagcgaccacagcaccggccatagcggctccctcacgtcagtcccagcgaaggcgtggcgataggcgcgatcctgccgcacaaggtcgggttgccggggcgccgctgaaagcaactgattgacgagacgaaggtccgcaccgcggccgccgcgcagtgcgtccgagatggtccagatgtcgcggcgcagatcataggcctgctgcatcgcagccgcggcctcgctgcttgccgaacgccccttgagcttcctggtcgcggcaagcggcaaggtcccgcggcgttcactccaggacaacagcgccgcataatccggaatcagctcctgcggatcgtccgaggtgcgccaatccagcgtgttcgcgaagtcaaggcagacccgtccaccgaagaactgcgtcgctgcccgcgcgggatctcttgacatcacggcctctcacaaagtctaatctaatggtcatgaccattacaagtgtctcaccacgagcctcaacgatgactgccgccggattcaggcgcggcctgatcgcggcgctgccgttcctgctcagcaatggcgccgccggcctcgtcatgggactgacctacaaggggctcgggctgggagcagagcacgccattctgttcagcctgctggtctactccgccacggcgcaagcgatcacgctgagcatgtgggctcatccgctgccggtcgtcgccatggtcgtcgcctgcattgccacgaattcacgatacttactgatgggcgctcatctgcgccagctgtttggcggactggccccgcggaagatgctgccgacgctgtttctgctggcggatgcgtcctggctgatgacgagttctgacgccgatcgcaacgggccagatgcgggttatctgctcggatcgggcatcccgatggcgatcggctgggtcggcggcaccgcgcttgcctatgccgccccgctcgcgaccaacgaaccgctcaggctcgccgccgcgctgctgccgacgatgttcatcgcgaccctgctgcctagccaatggaagaatgtgagatcgctctggccgtggctgacctcagccgtcgcggcgctgctcgtggcccggttcgtggatccgagctggtcgatgctgatcggaggcggatgcggcacgctcgtgagcatgatggagcgaagcgatggatgatttgcgggtgctcggcgtcatctgcatcctcggcatcacctgctatgcgatgcgcgccggcggctatgtcctcgctgcgtcgatgcgcgatgatggcatcgccgcccggttcctgcggctcgcgcccggcaatctgttcattgcattcatcgtcggcggctgcctgtcgggcgggttggcaggccttgtcggcaccgtggtcgcgctcgtgaccatggcgatcacgacgcgagaatgggctgcgctgggcgcggggttcagtgcggccctggccgcgtcctcgatcggattgtgaacgtcgatcgctatttcgacgcgatcttgtcccattgctcgcgggtgcgggtcttcagcaggttccagtcacgcgccgcgacgtcccaattgacgatggtgcgcgtgtcctgcgccacctcgccattggccacgctcgatgtgcgcatcgagtcatagacatacacgccgcatatcagcagcagcgcgcccaagatcatgccgaaaaacgtccgcatcacgcaatccctccagtgtccgcgggataacgtcgtgaggctcggcatggttccggcggatgatctctgcgtgtgaacggtcaaccgttcctgcgtgcgctgtacgccgggccgcgacggtcccttcggcctcacatgctgctcagccagcgaaaaatctccgcgttgatctcgcgcggataggtgtggctgagatcgtcgatctcgcgataggtcacgctggcgccggcggccgacagcaggccttgggtctgccgcgcggtctgcaccgggaacatccagtcgagcttgccgtgagtgatgaagatcggcaggccgcgcaaccggtccgcatcggccatttcagccatcagcggatggaaggtcgccgcgaccggtgccagatgcgtgaagcgcgaggcgccttcgagcccggtcacatagctgaaggtgccgccgtcgctcatgccggtcagcagcatccgtgtcgcgtcgacgttccagcgcgcggacacctgatcgaggatgcggttgaggttcggcgtgtcggtgtcgtcgcccatcagcgcccaggtctggccggtcgcggtcggcgccaccaggatagcgccgcggctgcgcgcgtcgcgcagccagctccacaggaagccgcggccgttgccgctgccgccgtgcagcgccatcaccagcggccaggcgcgatcgggcgtgtagtattccggcacatacatcgagaagccgccgcggctgcccggttcgttgcgctcatgaaagataccggtgtcgtcgttgggcgtggcggcgagcttggcctgcagctcggcatcctcgcgcaggtcgggcgcgatgaagaagccgctgaccggcggcaattccgtcagcggataaagcgcctcctgcgcgcgcggcagatagcgcagcgcgcggaatacgccgacgaggtcgccttcgccgttctgcactgcgcgcagccctgcataggcggcgagcgccggttcgatggcagcgtcaagtgcagtcttgatgtgcgcgaatttctccggccaatcggccagccgcggccgaaccgcctgcaacgcctcctcgggctcgcctgcgatctgcatcacgcgatcgaagtccggcggattcaggttgcgggcgacgaaggtcagcgattccagcgtctgcaacagcggcggcagcacggccacgatgtcgtcaaccacggcctcgctcatcgttgctgcctctcgttctgtactaatgcagccgcggcgccttcagcagcttcatgcggtcgatcgaggtcagcgtcacgtcgaaggtgacgccctcgtgatagaccgtcagcggcacgtcgacgccggcggtgccgagcgaccagagcttgcggtagaagccggtctggctcgttaccttgtcgccgtcgaccgcgaggatcacgtcgccggtcttcagctcggcgcgcgccgccggtcccttgctggcgacgccgaccaccacgaggcggttgtcgatctcggtcgtgtacatgccgagccacggccgcgccggcttgtcgacacggccgaatctgcgcaggtcgccgagcaccggcttgagcaggtcgatcggcacgatcatgttgacatgctcggcgcggcccgagcgttcgcgctcgagctgcagcgagccgatgccgatcagctcgccggcattgttgatcagtccggtgccgccccagttcggatgcgccggataggtgaagatcgcctcgtcgagcagatattcccaatagcccgcgaattcctgcttcgccgcgatctggctcgcgaccgagcgcgtgcggccgccggcgccaccgagcacgacattgtcgccgacctgcgtcgccgccgacgagccgatcggcagcggatcgatgtcgagcctgccgagcgcctgcaccaggccgaagccggattcgaaatcgaagccgagcgcgtgaccctcgaccgcgcggccgtcgccgagatgcagccacaccgtggcggcttcggtgatcaggtagccgatcgtcagcaccagcccgttgtcgatcaggacgccgttgccggtgcgctcggtgccgagcgtctcggcgctgaatgcatcaggcggaatgatcgagtgcagcccgaccacgctcatcagtgcacgatcgaggtcatagcggtaatcttcggggcgaggctgaaaggccgctggcactttcggttcggtcgtggagggcatctgggatctcctggcgtgcaggggcgctggaacctcaagctaatccgaggttctgccggcagggaagatggaatgatataccctgcgcggcggcctgcacagctcatctggcgtgcagacctccctctcgcaagacaaaatgaacttattcgcttttggttgccgcgcgcgccggcatgatgcggaaggcgcggttgtccttgatccacgcggcgcgctcgtcgcgcagcatcgtgcggcggacctttccggaatcatcgcgcggcgcggtggtgacgcgctcgaagctttccggatgcttgtagcggctgagccggtccttgaggaaatcacccatgccgtcggcaatctcctgcgcgtcggtgtcgtcggcgagctcgaggatcgcatgcacgcgttggccgaattccggatcgggcaatccgaccacgacgcaggagcgcaccttgggatgttcgctgaccgcggcctcgacctcggccggatagatgttggcgccgccgcgcagcaccatgtcggcaagccggtcgccgagatagagatagccctcttcatccagacgtccgatatcgccgagcgattcccaaccgtccggccgccgcttcggcgtggcgccgagatagtgataggtcgagccggcgccgtcattgggcaggaagtagatctcgccggtctcgccgggcttaacgtcgttgccgtcctcgccgatgatacgcagcttggcggtctcgccgatcttgccgaccgagcccttgtgagccatccactcgacgcccgagatcacgcaggcgccctgccgctcggtgccgccataaagctcccacacccgctccggcccgagccattcgatccacttctccttcagccagggcggcatcggagctgccatatgaaacacgatctgcaggctcgagacatcgtagcggttgcgcacttcctcgggcagcgcccagatccggtgcatcatggtcggcacgaagttgacccattgcacgcgctcgcgctcgatcagccgcagcgtctcctcggcgtcgaacttcaccatgccggtcagcttgccgccgccgaacaaagcggagtgcgacaggatgaacggcgcgttgtgatagagcgggccggggttgagcagcgaggcctgatgcggaatcccgagcatcagcggcgtcgtggtttcgatcacggcggggttgtggtcgaggatcaccttcggccgcccggtcgagccaccgctcgtcatcgccttccagtagcgcgcgaccggcgcgtcgagcggctccccggaaaatccctcaggcacgaaattcaccggcagcgaattcggtgcattccagtcggcttcaccaccgaccaccaatgacggtttcaaaatctcgagcaccgcggcggcctcgccgcgcggcagccgccacgacaacgaggtcggcgtcgcgccgcatttccacaccgcgaaggtggtctcaaagaatgcgttgctgttgggcagcccgatcgcgacgaagtcgccgggcttgacgcccttggcggcgaaggcgcgcgcccgcgcattggcgcggcgctcgagctcatgccaggtcagcgcatccgcgccgtggctgacggcgatcgaatcagcgggcttgcgttcggcataccagcgcggcacgtcggccaaggggatcagcatggatcgtttccgtcggaaaaggcggcttgaagcgctcttgttgcagggatgtggccaaagccacggctgacacttcaccaacagtgcggtcgcggtgtcaaggtccggagcgccaatatgggcagtatcccgctgagggaactgcggaatctccgtttgctaaaagccgcgtcaagattccggtaaagttcaagcgatcacgctaagccggactttacgggggaacggcattgtggcccgtgcggtgacatgccgggcgcgtcgatcgacctgcgcggtcctaaggttttcaatgaccaatgtcttcaaggacgacgacgatggcgagcaatggagcacgtatcaaggtcagtcgcgagccgcggcgccagctcaacaatcgcgcggcgtggatcacggtcgacgacggcgtgactgagaacgcctgcgccgtggtcgacatctcgcccggcggcgccaagatcaccaccgaggtcgagttcgacgtgaaggaccgcctcgcgctgacgctgctcgccgaccacgccaagcgctacccctgcgaggtggtgtggcgccgcggcaagacctacgggctcaaattcgtcaccgcggaggcgtagccggacgcgccggccgcggagccggtcggcgcggcgtagccgaaggctctgccgcgcgacggcgagaccgtacccggcggttcagcgatcaacccgatagagctttgcgaattcgccgtcatggagcggcgagagcttctcgatcgtctgaaatcccggctttgggtcgatcaggagcacataatcgaaatgcgagcgccagccgaccaggtagcgcgaccactttagggtttccgccgagaacggttcgttggccagcgcctcccagtcgaccggctcccgtcagcggctgagacattcgatcgaacggcggcagaatggacaccggttgttgcgccgggtcggcaaacaacaatggccagaacgccctgcgctcaacggggagcaatgccgggaggtggttggtcagccggccaatgccgggcagcgtgcggcgcgccggaggcgccatcgtccgtttccccgacgagcccgtcgcgagcaggacgcgcgcgccgggctcgacgccgtcgattgccgcgcgcagatcggcaaggtcgtcccggctgtcgatccaggtcgcagcgacgctcgccgagcggacgagaatcaaggccgcaacagcaatgccgaacatcattgcctcccgccgcgcgatccggggctgcacccccgcgaacagcagcaatgcgaccatcaccgcagcccgcagatctacgtaggaccctccctttattcgcaggggcgcggcgatgtagacgattgccagcacggcgatcgcaagccgcagccccggagcaaatgcgagatgacggcgcatggcgaccagcgcgacgataacggcgacggcggtcacgatcgtcagctcgacgttcggtatcgtgaatgggctgaacggcctcatcagtttgacgatcgcatgccacgcgccgagcgacgtggcggtgtcgctgaacggactgagccgatacagcacgagcgccggcgcgagagcgatcaggatcgggatcgcggccttcatgaaatcgcgcgcggtgaccgtgcccgatgaccagcgtctccggagtcccgatgcctcttctgcaccgatcaggaggaatagaaaggcgagcccgaagatgtggatgaagaaggtcgcgaccgcggcgatcgcgccggccagcgtcttccacccggaacggttccgccggcgcaacgcaacccaggcggccgcaccgatcagcgccaggcccagcgagaacaggaaattcatgaaacccatgaagaaggccgcgttgtaggcgaccagtcccgacgccagcggccaataggaacggcagccgaaagcgacccgatggtacacgaccgcgccgcccaccggcgcgagcaggctcagtgccagcaatattcggccaccggtgtgcgtatcggttatgcgcagcagcccggccccgatgacgtccatgccgagattgggcaagatcgtccaatgcggcgcatatatcttcgagagcaccgggtcgtccggatgcgccaggatgaagaaccgcgcgaggtgatttggatagtccgcgagcggcggcacatcgatgacgagaaggggagccagcagcacgatcgcaagcaccaccgccgtcgccagccacggccaggccgcttcgcgcatcaattgaacgtcgctgccagacgccttggccaggggggcgtgcatcggcggctattccaactcgcccgctggcgcgcagtgcattcgaaaggcgcagccataggcccgcgccgtggtcgcaggcagcaacgcaaaccaggcgatggccacgatcacgttctggagcctgacgttcaggatcgtctgaacgaaccggatgcgaaattctcgcgcggcgagataggcagcgagcagcaccgcgcagatcgtgccgagcccattccaaccgatcgcgacgtgccggaacccggaagcataggagatcgcgaacgcgccgatcaggaacagcacgatcggcacccagagcaccgcaccgcgcgttcgttcgtggttggggtgctctgctgcattacctgtggttgtcacgcggtcatgtcgcacgcagtccattaatgttcaattacgcatttgaagcgtttggtaacgtgcaacctctggagttgaagaaatcagccgtcaaccccgctttcggcgatatgcctcaagcggcgcctctcgatcgcgaccgtgatcgggctcgacctgagggttccaccgctacgaatctgatcgatgggcccgcgccaaccaggcgctggtcgatcaactcggccggatcgcgccgtggcagcggtcgaagtgcagggcgcgcgctatccggagcagttgctcgggatggtcgggcgccgagagcgttccgctctcttcgccggggctcgcgaagcgagagcccgggatccattccaacgcttgttttgcggctcaatggattccgggctcagcccttcgggctgccccggaatgacgatggtgaaccatccctagcgtcgtcctggcgaaagccaggacccattaccccaaatctcgattgttgcgcgacgccgtggcggcgatcccgttcatcaccgaatgcggtggttatgggtcctggctttcgccaggacgacgggtggttagagccggagcgggtgaccgcttctgccctagcgttccgtcagcttcagctcgatgcggcggttgcgcttgtaggcgtcttcggtctgcgcggtgtcgagcggctggaattcggcgaagccggccgcgaccagacgctgcgcgggcacgccgagcgagaccagatattgcaccaccgagatcgcgcgcgcggaggatagctcccagtttgacttgaacagcgggctgttgatcggccgcacgtcggtgtggccgtcgacgcgcagcacccaggcgatctcgggggggatctgcttgtcgagatcgatcaacgcgttcgctaccgtgtcgagctcggtcttgccctccggcagcaaggtcgcctggccggtgtcgaagaacacttcggactggaatacgaagcgatcgccgacgatgcggatatcggggcggttgcccaggatcgcgcgcagccggccgaagaattccgagcggtacttcgacaattcctgcacccgctgcgccagcgcgacgttgaggcgctggccgagatcggcgatccggttctgcgattccttgtcacgcttctcggaggcatcgagcgcctcctcgagcgcggcgagctggcggcgcagagcgctgatctgctggttcagcacctcgatctgtgccagcgcgcgcgacgacacactcttctcggactccagcgccttgttcagctcgttggcgcggccctgcgcgtcgttgccggaattggcgagcccttcatagagccccttcatgcggtcgcgctcgccctcagccgaggcgaggccggcgcggagctgcgacacctggtcgtcgagcgtcagcctggaaagcttctccagcgacaagaggtcgttgagctgggcgatcttggcggtgagctgctccagcgccttgtccttgccggtcacttcctgcgacaggaagaactgcacgacgaggaacaccgacagcaggaacacgatcgacagcaccagcgtcgacagcgcgtcgacaaagccgggccagtagttgaagccggattcgctgcggcgcgagcgggcgagggccatctggtttccctttacttcctgtcagtgcggcgcgtggcagacggcttcgatgttgtggccgtcggggtcgagcacgaaagcaccgtagtagtttgcatgatagtgcggccgaattccgggccgcccattgtccctgccgccggccttgatcgcgtcgtcgtagaagcgatcgacggtggcgcgatcgtttgccgtgaaggcgatgtgggcgccggtctgcggcgtgccgcgccggccgatccagaagaaggccttcggatggatgccatagccggcaaactcggcaccctctgcataaaggcggctgatgccgagggagcgcaaggccgcatcatagaaggccttggaccgctcgatatcgctgatgccgatggtcacgtggtccagcacatcggcctccgtggctcagctcttctcgggctggcgggcgaggcgttcgagcagccgcttgatctcgcggttctgctcgccctggccgtcggcccattcgcggatcatctgttgctcggtgcgcatatgcgcgaccagcccctggattgcctccgccagattggccatcgccgccgtggtgttgcgaccacccgcgccgccgccaccctcctcgaaggtggcacgcagccggtcgatcgcgccctgcagatcggcgccgccggtcccgacgccgtcacctgagatgccgcgcaccgtggtggcgagccagtcctcgaggtcggtgtagaagcggttctgggcctggctcgactgcaggtcgaggaagccgaggatcagcgagccggcgaggccgaacagcgaggacgagaacgagatgcccatgccgccgagcggggcggcaaggccctccttcagcgtatcgaacagcgcgccggcgtcgccgccgaccttgagcccgtcgatcaccttgccgaccgagccgaccgtctcgatcaggccccagaaggtgccgagcaggccgaggaacacgagcaggccggtcatgtagcgcgagatgtcgcgggcttcatccaggcgggttgcgatcgaatccagcagatgccgcatggtctgctgcgagatcgacatccgtccggtgcgctcgccgccgaggatcgcagccatcggggcaagcaacgtcggccggcgctcgatggcgaggccgggatcggcgatgcggaaattattgacccaggccacttcaggatagagccggatcacctgccggaacgccaggatgacgccgatcagcagcaccgcgccgatcagggcgttgagcccgggattggcgaagaaggcggtgacgatctgcttgtacagcacgaccccgaccaggccgcagagcaccaggaataccagcatccgcaccaggaagatcctgggcgaggacagcttgctcagttcgatctccatctcggagcgggaagggggcattgccggatcatccgttcgcgaaggccgcatctgtcagcaatatggcacagcggcggagtgaggaaagccgaatccaaaggcggatggcagaaccctgggtcgagatcggggggactgtcgccgccttgcgcagctttgcggccggtcgccgcatcaccgttcgcgcgcgccccccggggccacgcgctgatcgcgagatcaggccgatttgcaggcatcgtcgggcgaggcgcgcgatgcacggtgattcggcaggattgtcgcatcatgatccgcggtgcggcattcctgtgcaggcaaacagcccgttcccgctcacgcagtccttaacgcattcccacagcctgcgatggaacccgctcacaatgcggtgacgacatgaaagatgccgcgaaatcaggatgatagcgttgtgtgacaatgagccgcccgacaagcgcattgcttcgcagcaggcagattttattttcacgagcagaggcggcgtcgtggcgatgccgccatttgttcattccaacccacaggggcgatcatctcaatgtctggacttcgcgcgcaatcggcatgcattgctctgatgctggccgtgacggcgccactgcttgccggctgcaacgaaccgaactccgcaaccgccgccgtacaagcatccgagccggacgtcagtgtggtcaccgtgaaggagcaggcgcgcgcgatggtacgcgagctgccgggccgcatcgccccgacccgcgtttccgaggtccgcccgcgcgtctccggtatcgtcgtcaaccgcatgttccatcagggcagcgaggtgaaggtcggcgaccccctgtaccagatcgatccgcgcccgttcgaagtcgagttgcagtcgaccgaggcggcgctggcgcgcgccaaggccgtgctcgagcagacctcgctgcaggcccgccgcatcgcaaccctcaccaaccagcgtgcgacctcggaggccgagaacgagaaggcgatcgccaatttgaagcaggccgaagccgacgtgcagggccgcgaggccgacgtcgcgcgtgccaagctcaacctggactatgcgacgattcgtgcgccgatcgacggcaccattggcgctgctgtgatcagcgaaggcgcgctcgtcgtgcagaacgacgccgcgagccttgcgaccatccagcagctggatccgatctatgctgacttccagcagtcggtgaccgaaatgaaccagctccgccgcgccctcgagagcggcgatctcgaccgcatcgcgcccgatgcgatgaaggtgcgcctcgtgctcgacgacggctcgatctatccgctgctgggcaagctgctgttctccgacgccaaggtcgatgcccataccgggcaagtgaccctgcgcggcgaattcccgaacccgaatcgcgtcctgctgccgggcatgtatgtccgcgtgcagatcgagcagggcattgacaccgatgcgatcgcggtgccgcagcaggcgatccagcgcaatggcggcggcggcagcgaggtgttcgtcgtcaaggacgacaatcgcgtcgcggtccagccggtgcgcaccggctcgctgcagggcggcacctggttcgtgaccgacggcctcaaggccggcgacaaggtggtcgtcgaaggattccagaaatttgccgccggcgacaaggtccggccgttggcctggcgtgagatcgacgctgctgcagcacaatcggattcgcagcagaccgcgcacgcgaagcagtgatccgacatgcctagcttcttcatcgacaggccgatcttcgcctgggtcgtcgccctgttcatctgtctggtcggcgcaatctcgattccgctgctcgcggtcgcgcagtatccgatcatcgcgccgccctcgatctcgatctcgaccagctatcccggcgcgtcgccggagaacctctacaacagcgtgacgcggctgatcgaggaggagctcaacggcgccgccaacatcctgaacttcgaatcgacctccgactcgctcggccaggtcgagatcatcgccaacttcaagccgggcaccgacaccggccaggcctcggtcgaggtgcagaaccgcctcaagcgcgtcgaggcgcggctgccgcgcgccgtgatccagcagggcatcctggtcgaggaagcgtcctcggccgtgctgcagatcatcacgctgaactcgaccgacggttcgctggatgaagtgggcctcggcgacttcatgatccgcaacgtgctgggcgaggtgcgccgcatccccggcgtcggccgcgccacgctgtattcgaccgagcgcagcttgcgcatctggatcgatccggccaagctggtcggctacggcctctccgcagacgacgtcaaccgcgcgatcacggcgcagaacgcccaggtcgcttccggcagcatcggcgccgagccgagcacggatacgcaaaagatttccgcgcaggtgctggtgaagggccagctctcctcgcccgacgagttcggcgcgatcatcctgcgcgcaaatgccgacggctcgacggtacggctgcgtgacgtcgcgcggatcgagatcggcggcctcagctaccagttcaacacccgtctcgacggcaagccgaccgcgggcctgtcggtgctgctgtcgccgaagggcaatgcgctggcgaccgcgagcgcggtcgaggccaagatgaaggagctgtcgcgcttcttcccggccaacatctcctacgaaatcccctacaacatcacgccggtggtgaaggcctcgatcgagaaggtcctgatgaccctggtcgaggcggtggtgctggtgttcatcgtgatgttcctgttcctgcagaacatccgctacaccatcattccgaccatcgtggtgccggtggcgctgctcggcacctgcgccacgctgatggcggtgggttactcgatcaacatgctgaccatgttcggcatggtgctggcggtcggcatcctggtcgacgacgccatcgtcgtggtcgagaacgtcgagcgcatcatggccgaggaaggcctgccgccgaaggaagcgacccggaaggcgatgtcgcagatcaccagtgccatcatcggcatcacgctggtgctgatggcggtgttcgtgccgatggcgttcttcccgggctcggtcggcatcatctaccgccagttctcggtcaccatggtggcggcgatcgcgttctcggcgctgctcgcgctgtcgctgacgccggcgctgtgcgcgaccttgctcaagccggtcgagaagggccacggccatgcccgcaagggcgtgttcggctggttcaaccgcgtgctcgacaccagccgcgccggctatacgcgcacggtgcagggctcgctgaagcgcaccggccgcctgatggcgatctatctcgtgctgttcgcggccgtcgcctatggcttcgtccggctgcccggcggcttcctgccggtcgatgaccagggcttcatcacgaccgacgtgcagacgccgtcggaatcgtcctatgcgcgcacggaaggtgcggtcgagcaggtcgagaagtacctgaagaaccgcgccggcatcgagaacgtcacattcctcaccggcttcagcttcctcggccagggcatgaacaccgcgcaggccttcatcacgctgaaggactggtcggagcgcggcccgaaggagtccgctgccgccatcgtcgcggacatcaaccgcgatttgtcgtcggtgcgcgacgcaaaaatctcggcgctgcagccgccgccgatcgacaatctcggcaactcctcgggcttctcgttccgcctgcaggaccgcggccagaagggctatgcggcgctgatcgcggcgtccgaccggctgatcgcggaggccaatgccggccctgtgctgcagaaggtctatgtcgaaggcctgccgccggcgccgcaggtcaatctgatgatcgaccgcgagaaggccggtgcgttcggcctcaccttcgaggacatcaacaacacgatctcgaccaatctcggctcgaactacgtcaacgacttcccgaaccgcgggcgcatgcagcgcgtcatcgtgcaggccgacaagaccagtcgcatgaacgcggacgacatcctcaattacaatgtaaagaacagccgcggtcagctggtgccgttctcggcctttgccagcatcgaatggacgaaggggccgacgcagatcgcgggcttcaactattatccggcggtgcgcatctccggcgaggcgaagccgggcttcacctcgggtgacgcgatcgccgagatggagcggcttgccgacaagctgccgcgcggcttcggctatgagtggaccggccagtcgctgcaggagaagctgtcgggctcgcaggcgccgttcctgctcggcctgtccgtgctggtggtattcctgctgctcgccgcgctctatgagagctggaccattccgctcgcggtgctgctgacgattccgctcggcattttcggcgccgtggtggcggcgacgctgcgcggcctgtccaacgacgtctatttcaccgtcggcctgatcaccatcatcggcctggccgccaaggacgcgatcctgatcatcgagttcgccaaggacctgcgcgcgcagggcaagccgctggtcgaggcgaccatcgaggcgtgtagtctccgattccgcccgatcctgatgaccggcctcgccttcgtctgcggcgtgctgccgatggcgatcgcgaccggcgccggcggcgccagccagcaggcgctcggcaccagtgtgatgggcggcatgatcgccgtcgtcatcctcgcgctgctcctggtgccggtgttcttcgtcagcgtgcagcgcgtgctggctggtgaccgggagaaggtcgagaagccggaagtctacggcccgccggcgccggtagcgggcggccactgacatcgaggccggtcctgattgaatcagggccggcttgctttcgcagcatcgccaatccagactgcatctctggattgaatggattgtccttggcacggtgacggaatgcgcaggcatcggccgatcgagagcaggtgatgcgcccgaccgacatcgagatcgcgaattatcgttccattcgccggctcttcatgcccatccacccgctgtcggtgttcgtcggcgagaacggcgtcggcaaatccaatctctacaagtcgatgtcactgttgcgcgacgcggcgacgggccggatcacccacaccatcgccgatgaaggcggattgaattcggtctcctggtccggcatgcgcaagcggggcgacgatccccggctgcggctggccacacgattcgacgacatcaaatattcgatcgagctcggataccccggcccggttgaggcggcgtttgccggcgagccgatgatcaggtccgagcggatcgagatgatccgcggcaagcgaaaagtcctgatggtggagaggacgaacgcgctggtcagcatccgcaacgagagcggcgtgtgggaaagccacaaggacgccctgctgccatccgaaaccgtgctggccggcttctttgacggcaagaactcccccgagatcgaccagatcagaaacgcgatgctgggctggcggttctatcacgacttccggaccgatcatgcgtcgccgatccgaaagccctgcctcgcggtcacgacgccgtcgctgagtgccgacggcagcgatctggccgcgacgctcgcaacgctctactccatccggcaggatgccgccgagctgcaggccgcggtcgaggatgcattcccggatgcggagctccgcgcatgggtagaaaacggcccgtgcgagttcgatctaaggcttgcggatatgccgcgcccgttcaaggcccacgaattgtccgacgggacgctgaaatatatctgcctgctcgccgtgttcatgggctaccggctgcctccgttcatcgtgctgaacgagccggaggcgagcctgcatccatcgctgctggcgccgttggcgcggctgatcgccaaggcgtcgcgccgcgccgacatctggatcgtcacccactcggaccatttgatggaggcgctgcgtagcgagagttcggtcccgttgcgccgggtggtcaaggtgaagggcgccaccgccatcgaaggcctcagcgccggcggtgaatttcgcgacggggaggacgacggcgataatgacgacgacgaatagcctgcgctgtcgccctattgcctgagcggcttcaggatcttgatcagctcgccgtgcacgaactcgttgccgccgacgacgtggccggtctgcagcgggtcgtcattgccctggatgccggagacggtgccgccggcttcccggatcatcagcaggccggccgcgaggtcccagggctgcagattgcgttcccaataaccgtcgaggcggccggcggcgacgaaggcgaggtcgagcgaggcggcgccgaagcggcggaagcccgcgaccttgctctgcagcgcggccagctcctgcaacgccagctggtggttgccgcggccgatatgcggcaggccgcaggcgaccacgcattcgttgagctggcggcggccggcgacgcgcagccgctggtcgttgaggaacgcgcccttgccgcgctcggcgatgtagagttcgtcattggcgggattgtagatcacgcccgcgatcacggtgtcttcgcgcagcagcccgatcgagatcgcgaattgcgggatgccgtgcaggaaattggtggtgccgtcgagcggatcgacgatccaggtgtggctcttgtcggagccttcgcgcttgccgccttcctcgcccaggaacccgtaaccgggccgggccttttcgaggtcggtgtagagcatctcctcggcgcgcttgtcggccagcgaaacgaaattcgccggccccttcagcgacacctggagatgctcgatctcgccgaggtcgcgcttgaggctgcggccggcgcggcgcgcggccttgaccatgacattgatgagggcggagtagagcatgatgagaacttgtgaccgagattgtgaatgtcgatagagcggcgggcgcaaatctcagcccgtcatcctgaggagcacgaagcgcgtctcgaaggatcgacggcccggtccggggccgtgcatccttcgaggctcgctccgctcgcacctcaggatgacgggcggaaaaagaacggaacgcggccacctaggcttcggactgggtgccctctggaagtggcgccgtcaaggcgtcatttgacgttgtttccgatccattttcgggcagcggcctcccccttggcgcggtcttccgggggcatgtcggcgaggatgtcgtcgagttcggggtcgcccttgccggcggtcttggcgacggtgtgccatttcagcgcctcgaccttgtcgaccggggcgccggcgccggtcgccagcacgtgggcgaggcggttttgcgcgatcgcgctgttctgccgggccgccttgcgcagcagcgccaccgccgccggcacgttccgcggcgtgccggagccgttgtagagcgcgatggcatattcgacctcggcatcgacattgtcggccagcgaggcggcctgcagcagccgtgcggctttctcgaggtctttcggcacgccggtgccttccttgtagaaggtcgcgagcgcgtattgcgcctcggggctgccggcatccgccgccatccgcagcaactcggcggagcggcggaggtcctgcggcagggtctggccgtcgagatagagcagcgcgagattataggcagccttgggctcgccgagcttggccgccgatgccagcagcttgaccgcggaatccttgtccacggtgccgccgcggccagcgatccgcatcatggcgagcgcgaacatcgcctcgcggtcgccggcgtcggaggcgcgcttgtaccagtcgtcggccttggcatagtcgcgcttgacgccgagcccgttggcatagagctcgcccagcatcgtcatggccttggcatcgttgctgttctgcgcgcgcgccgtggcgaggtcgaatgcggtcttgtacatgccgcgctgataggcgccgtagacgaggtcgacattgggatcgtccggcgtcggggagggcgtcggcgttgccgatgcgccgggcttcggcgtcgtcgttgcggcgggcttcggcgcaggcttcttcgcggccggcgcatgcaccttcggcttctccttcggtgcctccttcttcgcgggcgtcggcggctgtgccggcggcgtgatcgagagctgcgccatcgcgccgctcgtcagcatcatgcagccgagcgcaacacctatcggacgcaggcacgtcattccggcatcatccttcggccttcgccgttccgaatgtgtcggcatgcgctcgcgtaatcgcctcgccaatctcgaccagagcggccctggcaccgcgcggatccgaccagatgacatcgccaaccagcacgaaatccgcgccggccgccgcgaacgcctcggcctcctcgcgcgaggttgcaaagccgacgcagggcggctcgaacaattcatcccaccattccagccgctcggcgatcgcctccgccgagggccgctgccccttggcgtcgggctcgccgaacagcacgtagtcggcgccggcttcgcctgcggccatggaatcgtgccgtgtcgcgagcccgccgacgccgacgatgcggtcgggccgcagcgagggcatcgcctcttccatcgcggcaatgccggtcagatgcgcaccatcggcaccggcgcgggccacgatgtcgggatggccatcgatcaacagcgccgcacccgcgttctggatcgcaggcgccagccccttgacggtggagatcatgctgcgcgggtcgctctcgcgcagccgcaccaggacggcggcgacgtcggccgcggcgagcagctcggcaagcttggctgcaagctgcgacggctcgtcgaccggcggggtcgccagatagaggcgcggcgccggccgcggcggaacgggcttggtggccaactatgccgcctgtttctcgaggccggcttcccaattgccggtgctggcgagcccgttcatccgggcgcgatgcgagaaggcgcgctggcctgcggggacgttgtcgggcttgccggaccacgccttctgcggcgccgcctgcagcgcacggccataggagaaggtcagccgccacggcaaatgaccgatcttgttcatggcgtcgagatgcgcggtcgcttcctcgtcgctctggccgccggacaggaaggcgatgccgggcaccgcggccggcacgcagctcttgagcaggcggatggtcttctcggcgacttcctgcaccgatgcctgcttcgggcacttcttgccggatatcgccatgttcggcttcaggatcatgccttcgagcgcgacacgctgcacccgcaattcctggaaggtgcggttcagcacgcgctgcgtcacctcgtagcagcggtcgatgtcgtgatcgccgtccatcagcacttcgggctcgacgatcggcacgatctgcgcggcctggcacagcgcggcgtaccgcgccagcgcgtgggcgttgacgcggatcgcggtcatggtgggaatgccccggctgccggcgccgcggctgcccacgccggagccgatatcgatcaccgcgcgccatttcgcaaagcgcgccccgcggtcgtaatatttcttcagccgctcggcgagcttgtcgaggccgacggtgacgagttcgcccgggcagttcggcagcgcctgggtgccttcgtcgaccttgatgccggggatcgcgcctgcctgctcgatcagcttgaccagcggcgtgccgtccttcgcgttctgccagatcgtctcgtcgtagaggatgacgccggagatgtatttgctcatcgcctcctgcgagcggaacagcatctcgcgatagtcgcggcgattgtcttcggtcgaatcgacctggatggcgtcgaaccgcttcttgatcgtgccggaggattcgtcggcggcgagaatgcccttgcccggggtgaccatggcaagcgcaactttgttgaggtcagcgaggttcatcgggaacgtcctccggggccattgcctttgcaaaccaaaataggcggttctcgggcaaatgcctagaaaacgttcgtcgcggccggcgtttgaacgttccacctctcccatcgggagaggtcgcgccgaaggcgcgggtgaggggatgcgctctatcgagggacctgaacccctcacccggatcgctggcgcgatccgacctctccccgatggggagaggtgatcgcggtcctcggcgggtgaagagcgctcaggcgaccttgggatcgagctcgcccttggcgtagcgcttggccatctcagccgtggtcagcaccttcttgatcttgctggcttggcccgcggtgttgaattcctgcaggcgctgcttgcacagcttggtcatcgcctccatcgcgggcttgaggtacttgcgcggatcgaactcttccggattgtccttcagaactttccgaatctggccggtcatcgccatccggttgtcagtgtcgatgttgatcttgcgcacaccgttcttgatgccgcgctggatctcggcgaccggcacgccccaggtcggcttcatcttgccgccattggcgttgatgatctcctgcagctcctgcggcaccgacgaggagccgtgcatgacgagatgcgtgttcggcagcttgcgatggatttcctcgatcacgttcatggcgaggatgtcgccgtcgggcttgcgggtgaacttgtaggcgccgtgcgaggtgcccatcgcgatcgccagtgcgtcgaccttggtctcctggacgaacttcacggcctcgtcggggttggtcagcagttggtcgtgcgacagcttgccctcggcgccgtggccgtcttccttgtcgcccatgccggtctcgagcgagccgagcacgccgagctcgccttccaccgagatgccgccgagatgcgccatgccggtcaccgtccgggtgacgccgacattgtagtcccagtcgccgggggtcttgccgtcggccttcagcgagccgtccatcatgaccgaggtgaagccggcctggatcgcggtcatgcaggtggcgggctcgttgccgtggtcgaggtgcacgcagaccgggatctgcgggtagatctcggtgacggcgtccatcatgtgcttgagcatgacgtcgttggcgtaggagcgcgcgccgcgcgaagcctggatgatgaccggcgcgtcgacctcggaggccgccgccatgatcgccagcgcctgctccatgttgttgatattgaaggcaggtacgccgtaatcatgctcggccgcgtggtcgagcagttgtcgcaatgtgatgcgagccattccatttctccctgtagtgcgttcgcggatttgaactaaatcaacggtttttcaaaacttcgacgcccggcagcggcttgccttccatccattcaagaaacgcgccgcccgcggtcgagacataggaaaaatcaccggctacgccggcctggttcagcgccgcgacggtatcgccgccgccggcaaccgagatcagcttcttggccctggtgcgctcggcggcgtgcttggccgaaaccacggtgccgcggtcgaacggcgtcagctcgaaggcgccgagcggcccgttccagaccagcgtcgcggcgtcgtcgatcgcggcgtggatgcgcgcgatcgattgtgggccgacgtcgaggatcatgccgtcggccgggatcgcatcgaggccataggcatgcgacggcgcgttggcggcgaactggttggcgacgacggcgtcgacggggaggatgatcgcgcagttggcggcgttggccttctccatgattcgcagcgcggtcgcggcgaggtccttctcggcgagcgacttgccgaccgcgacgccctgcgcgtgcaggaaggtgttggccatgccgccgccgatcaccagcgcgtcgaccttgttcacgaggttttccaaaaggtcgatcttggtcgagaccttggcgccgccgatgatcgcgatcacgggcttggtcggggcttccagcgccttagccagcgcgtcgagctcggcctgcatggtgcggccggcatacgccggcagcttgtggccgaggccttcggtcgaggcgtgggcgcgatgcgcggcggagaaggcgtcgttgacccagatgtcgccgagttttgccagttcagcaacgaagccggcgtcgttcttttcctcttccttgtggaagcgggtgttttccaggcagaggatgtcgccatccttgagggctgcaaccgcggtggcggctgcttcgccgatgcagtcctcggcgaaggcgaccggacgattgatcaccttcgacagcgcttccgcgaccggcttcagcgagtccttggcatcgcggcccttgggtcggccgaaatgggcgagcaggatcaccttgccgcccttgtcggaaatctcggtgatggtgggggccacgcgctcgagccgggtggcgtcggtgacgcggccgccatccatgggaacgttgaggtcgacgcgcagcagcacgcgcttgcccttcacgttgacgtcgtcgagggtgcggaacgattttgtcatgagcgtttcctgtgcggccggacacagccgtccgatggacggcgttgcgttcgcttgccgatgtcgcggccgttgcggccgcgaatgcggagggcaaagacgcagatgcccggctttgggccgggcatcgcgaacagtcgaacttaagccagcttgccgatcgcgacggcggtgtccgccatgcggttcgagaagccccactcgttgtcgtaccaggccatcacgcgcaccagcatgccgttctgcaccttggtctggtccatgtggaaagtggccgagtgcggatcgtggttgaagtcgatcgagacgttcggcgcgttggtgtagccgaggatgcccttgagctgctgctcggcggcgcgcttcatcgcctcgttgatctcagcgatgttggtttcgcgcttggccacgatcttgaggtcgatcacggagacgttcggggtcggcacgcggaccgagacgccgtcgagcttgcccttcagctcgggcagcaccaggccgatcgccttggcggcgccggtcgaggtcgggatcatcgacatcgcagcggcgcggccgcgatagaggtccttgtgcagggtgtcgagcgtcggctggtcgccggtataggcgtggatcgtggtcatgaagccggtctcgatgccgacggtgtcgttcaggaccttggcgaccggcgcgaggcagttggtggtgcaggagccgttggagacgaccagctgatccttgttcagcgtgtcgtggttgacgccgtagacgatggtggcgtcggcgccgtcggcgggcgccgagaccagcacgcgcttggcgccggcggtcaggtgcgcggaggccttgtccttcgaggtgaagatgccggtgcattccagcgcgacatcgacgccgagggccttccacggcagcttggagggatcgcgctcggccgaaaccttgatcttgttggcgccgaggctgatcgagtcgccgtcgacggtcacggtacccgggaagcggccgtgcacggaatcgaagcgcagcagatgcgcgttggtctcgaccggaccgaggtcgttgatgccgaccacctcgatatccttgcggccggactcggcgatggcgcgcaggatgttgcggccgatgcgcccaaacccgttgatcgcgacgcggattgccatgctcgtctcctctaaagctgttgtcagccccgcgggagggctcccacgaggtttttacggcggaacgcccggttcagccgggcgcgtacggaaaagatggagctttggtaatcctttttcgcgacaagctcaaccgtaggccgcgggtgccagcccagcgtcagacgcgcttggtggcagcgttaacgacggcctcagcggtaatgccgaaatgcgggaaaaggtccttggccggggcgctggcgccgaatccgtgcatgccgatgaattcgccgtcgtggccgatcacggcgtcccagccccagcgcaccgcggcttcgatcgcgatcttgaccggagccttgccgataatggcattttgccgctcggcgggctgcgccagcagcaattccagcgacgggaccgagacgacccgcgtcgcgatgccgcgcccggccagctgcttctgcgcctcgaccgcgatctggacctcggaaccggaggcgaacaatgacacttttgcctcaccctgcgccgcgaccagctcgtaggcgccgtggctgcacgggttgtcgttcggcgccgtggtgcggagctgcggcaggttctggcgggtcagcgccagaaccgtcggtccgtccacgcggttgagcgccagttcccagcactcggcggtctcgaccgcgtcgcagggacggaacacgcgcatgttgggaatcgcgcgcagcgccgaaaggtgctcgaccggctggtgggtcgggccgtcttcgccgaggccgatcgagtcgtgggtcatgacatagaccacgccggtgcccatcagcgccgacaggcgcatcgcgccgcgcgcatagtcggtgaacaccaggaaggtggcgccgttcggcgcgaagccgccatgcaggaagatgccgttgaggcacgccgccatgccgtgctcgcggatgccgtaatggatgaagcggcccttcggcgtcttggcgccgaacgcggttgccgacttcgccttgttgttgttggagccggtgaggtcggccgagcccgcgacgaactccatcggcatcgcggccgcgatcacctcgatcgcggcttccgacgacttgcgggtcgcgacgttgagcggattttccaggaggcccttcttgaaggcgcgcaggcccttggcgagcgaggccggccgctcgtgacggatgcggcgctcgaactcggcgcgcttgcggttgccgagctgcgcgaactgctcgccccaggccttgtgctcggccgcgccgcggctgcccgcctcgcgccaggccttcagcacgtcgtccggcaccgagaacggctcgagcgagatgccgagcttctccttggcgcccttcagctcagcggcgccgagcgcctcgccatgcgccttggcggtgccggccctggtcggtgcgccgaagccgatcgtggtcttgcaggcgatcagcgaaggcttgctggatttctgcgcgcgggtgattgcagccgcgatcgcctccggatcgtggccgtcgatcaattcggcggcccagccggcggacttgaagcgcttcacctggtcgacggaatcggcgatcgaggtcgggccgtcgatcgagatgccgttgtcgtcgtacagcacgatcatcttgttgaggcgccagacaccggcgagcgcgatcgcttcctgcgagatgccttccatcaggtcgccgtcggaagcgagcacataggtgtggtgattgacgatcttcttgccgaactccgcggcgagcatcttctcggcgagcgccatgccgaccgctgtcgcaatgccctggccgagcgggccggtggtggtctcgatgcccttggtgtggaagttctccgggtgtcccggcgtcagcgatcccaactggcggaaatgcttgatctggtcgagcgtcatgtccttgttgccggtgaggtacagcaacgcatagagcagcatcgagccgtggccggccgacagcacgaagcgatcgcgatcgggccatgccgtgtcggccgcgtcgaatttcaggaatttcgtgaacagcacggtcgcgatgtcggcggcgcccatcggcaggccaggatgtccggaattcgccttctcgacggcgtccatggcaaggccacggatcgcattggccatacgggtgtgatcgacctgcgtcatgatgaaaagtccgcctggaatgaggagctgattgctggacgcatcggggcgggcagccgcgatacgcgcgtggatggccttacgggttggagggtggattagcacctcaattccgcaagtccaaggcgatgaaacgccccaaaacggggaaaagttgctcgaaatggccctatttcattgaacggtgcatagttcagcgccgccgttgcgcttcgctcgcttgccacgtaaatttcgtccgctaaacgcttgccgaaccgccagttttgccgtgtggcagggctgtctccagcggaattgaagggtccacgccgcgtgtcatgagtgatcgtctcgccaacgggtctggcaataccgaggcaccgcttgccgatatcgatgctgcgaccaagcggctgatggcagcacttgatgcgctggaaagctcggtggagcggcgccgcgaggccgaccgcgacgagaacgaattggcgagccggatccaggcgctcggcgccgatcgctcacgacttgccgacgaactcgacggttcgctggtgaagacgcgcaagctcgagcgcgtcaatcgcgacatcgcggagaagctcgacgcggcgatcggcaccattcgcgccgtgcttgcgggcggagaaggcagatgagccacatcaacgtcaccatcaatggccggcaataccggatggcctgcgaggagggccaggaggtgcggctgctgaagctcgcggagaatctgcagcagcgcgtcgaatcgctgcgcggcaagttcggcgagatcggcgatgcgaggctcaccgtgatggcggcgctgaccgcctgcgacgagctggtcgatgcgagcgcgcgcattcgcagcctcgaggaagaggtcgagcagctgcgcaatgcccgcaccgccgccaccgatcgcgcccgcgcgacccagaccgcggtctccaacgcgctcaacgcagcagccgagcggatcgagcgcaccacgcaggtgctcaaccgcaccatcggcggcggcatcgcgatcgggtgatcctgctccgccctcccccggaggggcaggcctggcgcatttggctgccggctatgacgacgtggaagcgtcggttgcagaagcatgtaaatgccatgcgcgccccctgggcgggtgccggcttgccggaattcggaataccggaagagtatcggtgagttgcccgacgcgtcaagtcgtttggacagtcgtttggtcgatcgccggccgccgccgctgctttgcatggggttgttttcgatattttggcggcgcgcccccgcggatgctctcaagtggacaatgaagtggagcaggagctccgcgtcgtccttaccgctggcggatttggccaacgatagctagattagccccgcgaagctgcgtcgtgcgtcaggagccatatatccccggggccttatcgatcctttagggaactgtccctggccgggtccgtggacccggacatatggtgcccacctactttcgtagggaactccgggatcgagcgctccaacggcctctgcggcttcgcactatttttgctgttgcctggtcgtcgcgcggcggcggttcgattgtggtgcaccgctgtcccctgcgaagcagggcgtccagtgcgccgcggcctggccctttgaatgcgagcgtctctgaatgatggatcgtccgttgtcgcggacgacgacagcggaagatggatcatgcacgcatctccatcgaaggccgagcttcgggcgcttgctctcgccaagcgcgacgcgctgagcgacgagcagcgtgcggccgcggccgaggcgctcgccaagcgccgcgtgccattcgagatcacgcaaggcatgatcatctccggctatgccccgatccgtagcgagctcgatccggcgccgctgatgaagaagcttgcggaaaagggggcgcggctcgcgctgccctgcatcaatgcgcgcggccagtcgctgacctttcgcagctggtcgccgcaggaccggctgatgctcgggccgctcggcattcccgagccgtcgccggctgcggccgaggtgcatcccgacgtgatgctggtgccgctcgccgcattcgacaagctcggccaccgcatcggctacggcgccggctattacgactatacctttgcgcatctgcgcaaggccaagcatgtgatcggggtgggaattgcctttgctgcacaggaaaccaaggctatcccggcgctgtcgcacgacgtcccgctcgattatgtgctaacggagcgcaagacgttcgatttccggagtagctagccttgcgtatcctcttcgttggtgacgtcgtcggcaggaccggccgcaccgccatttcagaccatcttcccggcatgatcagggactggtcgctcgacctcgtcgtcgtcaatggtgagaattccgccggcggtttcggcatcaccgaggcgatctaccaggagttgctggatgccggtgccgacgcgatcacgctcggcaaccacgcctggaatcagaaggaggcgctggtcttcatcgagcgcgcgccgcgcctgatccgcccgctgaacttcccgcgtcattcgcccggccgcggcgccaccctggtcgacaccaagaacggcaagcgcgcgctcgtgctcaatgccatcggccgcgtgttcatggagccgtcctcgaacgatccgttcagcgcgatcgatcgcgagctcgaggcctgcccgttgcgccagggcgcagatgccatcgtgctcgatttccacgccgaggcgaccagcgagaagcagggcgtcggcttcttctgcgacggccgggtcagcctcgtggtcggcacccatacccatgtgccgactgccgatcaccaggtgctgcccggcggcaccgcctatatgagcgatgccggcatgaccggcgattatgattcggtgatcggcatgcagaaggaggagccgctgcagcgcttcctcaccggcattccctccggccgtttcgagccggcgggcggtgttgcgacgctgagcggtatcgcggtcgagaccgacgatgccaccgggcttgcggtcaaggtcgcgccggtgcgcgccggcggccggctcgagcctgcggtgccgggattctggaccagctagcctgcgacaccttgtcgtgctttgatgggcagtgattttgatggggtagtgatttttcagtcccaatgatttttcgatatcggtgatttgcttccggagattgcagtgtccgagcgcgtcgaacgtcgtttggtggccttggtggcggccgatgttgccggctacagccgcctcatgggccgcgacgaggagcggacgcttggcgacctgaagggcgcccgccagacgctggtcgatccgaccatcgcggcatgccgaggccgtatcgtcaagaccaccggcgacgggatgctggtcgagttcgccagcgccgtcgacgctgcgcggtgcgccatcgaggttcagcgaggcatggccgagcggaacgtcgcggtgccgcccgatcgcagaatcgaattccgtatcggcattcacgtcggcgacatcatcatcgacagtgacgatatcttcggtgagggcgtcaacatcgcggcgcgcctcgaggggatggccgatcccggcggaatctgcatttcggacgatgcccatcggcaaatccgaggcaaggtcgacatcgatttcggtgacatgggctcacagtcgctgaagaatatcgccgagccgatgcgcgtttggcagattcggatcggcggcgagcctggctcgcagcgctcgacagtgccggtccaaccgcttccgctgccggacaggccgtcgattgcagtgctgccgttcgacaacatgagcggggatcgcgagcaggattattttgccgacggcatggtcgaagagatcatcacggcgctgtcgcggttcaaatcgctgttcgtcatcgcgcgaaattcgagcttcgcctacaagaacaaggctatcgacatcaagcgggtgggccgcgagctcggcgtacgctatgtgctggaaggcagcgtgcgcaaggccggcaaccgggtccgcatcaccggccagctgatcgaggcgacgaccggcaaccacatctgggccgaccgcttcgacggcgagctcgaggatatctttggcctgcaggacaaggtcacctcgagcgttgtcggcctgatcgcgccgaggctggagcaggccgaattcgagcgtgtcaggcagaagccgacggacaagctggacagctacgacctctatttgcgcggcatggcgctgattcatcagcgcgcctcgctcgccgatgcctataagctgttcaagcaggcgatcgagctcgatccgcagttcgccgcggcgcatgccatgctggcgtggacctggatggcccggcaggccacgaccggctcgccgctcgacggcccggagcggttcgaggccgtcaagcacgcacggctggcgtcgcgactcggcgaggaggatgcgttcgtgcagtcgacggccggccacgtgttgacctatctcgggcatgactacgacctcggctcgtcgatggtcgaggaggcgatcgcgctgaaccccaatctcggattcgcctggtattcgcgcggctgggtctcgctgatgtgcggtgagaccgaacgcgcaatcgagagtttcgaccacatgatccggcttagtccgctcgatcccctgcgcgtcagcgcctggatcggcatggcgcacgcctgcttctggctcgaacgctatgaggaggggtgcaaggttgccaggcggtcgttgcgcttcaactccaatgcgcattcattgggcgccttcatcatcaatgcgatccgcgcaggtgatgcggaggaggcgcgaaaggcgatcgctcgtctgttgcgggtgcatcctggcttccgtacctcgcatatcagcgaggcgttcccggtgcgcgacgccgtattgcgcgaccagatcggcgctgcgctgcgtgacgcaggattgccggagtaaccaaggcgttttcgagcgaagtggccgccgtttcgcgtcaagaagagcgtccgaacgacaagccctagccctgccggaaacccatccggaatgcgccccagtggcggccgccgacgaagatcggcgatgacaggtccttcatcaacacgaaattgccgccgcccatgtcgcggcggtaggtctgcagcaggaacggcttggtattggccgcgaccttgctcaccgcgcggtcgttgaacagccggcggttgcggcagttggcgttgttccacaccgggtccgggccctgcggctgccgatagttcggattgtgggtcggcagatagccgccgcgcgcccaggcgacgcagaacacgatgcgcggatcggccttctggatcggatcctggatcgcgggcagcacgcgatcggtgaaagagacatagtcggtcagatactgtttcggatcggtgccggcgatctcgcgatagttctcgtccatcaattgcgcgagcgtgatgtcaccttgcgcgaccgcgttctcgaacaggtcggagatccgtttcgcggtctcgatcacgacgcggatcagcggcgtatcagaggtctcgacgccgctgtcggcaatggtcacgatcaggctctcggagagctcgagcagcttcgccacgcggccgtcggcgtgcttgaggtcgcgcgaggacaggtcgacgcccttggcgagctcgttcagttccgtgattacgctctcgcaatggccgagattggaggtcgcggcgcgcgccacgctgccgatctcggcgccgaccaaggaaaagccatcctgcacgcggctgatgatgcccgagatctgctgggcgccctcgctggcgctcttggcgcgcagcgaggcgtcgccgctctcgccgatcaggctgccgatctggccgtcgagatcgcgtacggtgtcggaaatctgatgcgtcgcctggcgggtcgcctccgcgaggttcttcacctcgccagcgaccaccgcaaagccgcggccggcagtgccggcgcgcgccgcctcgatggtggcgttgagcgccaaaaggttggtctgcttggcgatcgcctcgatcgagccggagaccttggcgacctggctgagcgctgcaccgaccgcggcgagccgcgcctcgatccgaccgacggcggcgacgagttccgcaatgtggctgaccgccgtctggaccacgcggcgcgactcggcgatctggccggccgcggcggatgcggtcgattgcaccgcctgcgatgcgttggcgatgtcgtgattggccgagaccatggtctcggcggtcgcctgcaaatgatggaaccgctccgactggttggcgacgcggctcgcgacctcctggacattgccggcgatatcagcgagttcgacgccgaggccgccgatgcggtcggcgagctggtcgaccagccgttcggccagcgtccggtccgatgaaatatccagcactgcaagctgcgcagccgacatatcagcacgtcctccagtcacgacggcccgtcgagccgcagcagcattctccattccgatctaaagtgtgattcgcgaaggccgtcttgcctgagcgtgcactgggtggcccggattacgcttcgctgcatccggactacccagtcatcaaagcttgtaggccgtgcggaagccgccccagtgccggccgcggacgcggattggcacgtcgatctcgcgcatcatcacggtgttgccgttgcccatgtcgcgcgcgtaggtctggatcagataagcgcgctggttgcggccggcggcaaggccggctgcatcgttgaagatgcggcggttgcggctgttggcggtgttgaaggcgacgtcgcccggccgctgcggctgcgagtagaccttgttgtggaccggcagatagccattctggtcgatcgcgacgcagaacgccatccgcttgtccttggcaaggaacgcctcctggaaggccggcagcgcgcgctccgcccagtccagcatccgggtgcgatgctgcaccgggttggtgcccgcgatctcgacatagtcggtgtcgaacatgtctgcgatcgcaatcgcaccgctcgccagcccgttctcgaagatcttgctcagcgcgtggccggcttccatcgcgcgggtgacgaactcggtgttctcctcgtggatcgcccacatccggtcttcgatcttttcgcggagttcggcgttcgccgcttcgaagcgggcctggcagccggccttggagcggtcgccgatcctgatccggcacgcgccgatatcctgcaacctcgcgctcagggtctcatgggccggcagcttctcggcgtcggggccgccgatcaggatgccgtccatcgcgatctcgtagacctgtgcggtgacggtgccgcgcgtggtcttgatctcgatggtgaggctgcagggcaggcgctcgttcctgcgcgggtcgacacgttcgttctggcgcaacagcaccgcgcagcgggccttcagcttccgggcgaagccggtcaccgccttgccggccttggcgacatcgtcgccatgcgcggcggcttcctgcgtcgccgagtcgatctcgccggcgctggtgccgaccgagacgatgaagctggaggcggaggccgcgttctggccgatctcgccggtaatctggttctgctcggcgaccgcgccgttgacgttctcgaacaccgggcggatcttttcgatcgcctgcgagatgcggtggacggcgtccgccgatccggtggcgtccttctgcaaagcctcgatcttccgcgtgatctcctcggttgcgctctgggtctgtaccgccagcgccttgacctcggtcgcgaccaccgcaaagcccttgccggcggcgccggcgcgcgccgcttcgatcgtcgagttgagcgcgagaagggtggtctgccgcgcgatctgcgcgatcagattgacgacgttgccgatcgcggcggaggattcgcgcaaccgatcgacattggcggtggcctcgcgcgccgcggccgcggcgtcgtcggcgagctggctcgcgctgcgcacctgttggccgatgccttctgcggaatgggtgaagcggtcggcggcctcagagaacgttgtcgcggtgctctgtgcgtcgctgctgcggccggtcagcgcatcggtgcgggcgcgaatggtggcaagcttggctgccgtcgcctcggcgccgtcggcaaccgagctggcggcgcgctcgagctggcggatcatcgcgccgagctcgagttccagcagctccaagatctccttggccgaatcggcctcggtggagacctcgggcgtggcaaccgcggctggaacctgcggcgcgacggttggcgcaaccggctccggcacttgctttcgaaacaaaccgaacgccatgggagttccgggggctctgggaaagttacggcgggacggcggcgatcctcgcatccgggcatgaagtcatggttaacaagtgcctcatattccggcatgcggtagtattcccgggcccgaaggcctcgccgatcctttgattttgaccgtgagaggcctataaggccgcgttttccaccctcgttcagaccctaagcctcgaagagacgtcgcatggccggccattcccaattcaagaacatcatgcaccgcaagggccggcaggatgcccagaagtcgaagcttttcggcaagctggcgcgcgaaatcactgtggcggccaagctcggcacccccgatccggcgatgaacccgcgcctgcgcgccgccgtggtcgcggcccgcgccgagaacatgcccaaggacaatatcgaccgcgccatcaagaaggcggccggcaacgagggcgagaactatgacgagatccgctacgagggctatggccccggcggcgtcgccgtcatcgtcgaggcgctgaccgacaaccgcaaccgcgccgcctccgacatccgctcgttcttcaccaagtccggcggtaatctcggcgaaaccggctcggtcgcctttatgttcgatcgcaccggcatcatcgaatacgacgccaaggtcgcctccgacgatgccatgctggacgccgcaatcgaggccggcgccgacgacgtggtgtccagcgagggcggccacgaggtctacgcctcgcaggataccttccgcgacgtggccaaggcgctggaagcgaagttcggcgagccgcgcaaggcggcgctgacctggaagccgcagaacaccgtcgcggtcgacgacgaaaccggcgaaaagctgctgaagctgatggatctgctcaacgagcacgacgacgtgcagaacgtgttcgccaatttcgaggtgtccgacgcgctgatcgcgaagatgggcggctgagccacttactctgctgtcatcgcccgaacactcgaccgggcgatccagtattccagaggctgtcgttgtgcttgatccgataggccgcggcgtactggatcccccgctttcgcgggggatgacgagcacggctggatgacgggcaccgtgcgatgacgcgcggagcgggggatggtactccgtttgtgtttcgttctcgcaggccaggcggtatcactaccccatgacagcccagccgattcgctctcccgtccgcatcatcggtatcgatccgggtctccgccgcaccggctggggcgtgatcgagaccgaaggcaaccgtctggtgtatatcggttgcggctcggtcgagccgccggacgatctgccgctggcgagccggctgctcgcgatccatgaggggcttgccgcggtgctcggcgacttcaggccggccgaggccgcggtcgagcagaccttcgtcaacaaggacggcgttgccacgctgaagctcggccaggcccgcggcgtagccatgctggcgcccgcaatgttcggtatctcggttgccgaatacgcgccgaaccaggtcaagaagaccgtggtcggcgccggtcacgccgagaagaaccagatccaggtgatgctgaagatcctgctgccgaaagccgagccgccctccgccgacgccgcggacgcgctcgcggtcgcgatcacccatgcccatcaccgccaaagtgcggcgctgcggctcagggtggcgaacctatgatcggtgcgagtgaggcgggcgcgctgatcgggctccctccccccttgcgggcaaggggtggggagaggggtaagcccagggcgagacggtcgatgcgttcatcactctcgcaaggtcggtcacccgccgccgaaacggaaattgagagagcgcgtcgtgtggtacccctctcactaatcctcccccgcaaggggggagggagcccttccgccggtacgtcccacactgaagcattcgaacgcagtgcgagcaccgagtgcgaggtggcaagatgatcggcaagctcaaaggcctgatcgattcctatggcgaggattacgtgatcctcgacgtcggcggcgtcggttatcaggtgcattgcgctggtcgcacgctgcaggcgttgccgtcgccgggcggagcggccgtgctctcgatcgagacctatgtgcgtgaggacgcgatcaagctgttcggcttccgcagtgatcacgagcgcgaatggtttcgcctgctgcaaaccgtgcagggcgtcggcgccaaggtcgcgctcgcggtgctcggcacgctgccgccgaccgatctcgccaacgccatcgcgctgcgcgacaaggcggcggtggcgcggaccccgggcgtcgggccgaaggtcgccgagcgcatcgtcagcgaattgaaggacaaggcgccgggctttgccgatgtcgatcccgctgtggttcagctctcgggcgcgatcgacaacaaccgcgcgccgcgcccggtcaccgatgcgatctccgctctggtcaatctcggctacggccagccgcaggccgccgccgccatcgccgccgcctcgcgcagcgccggcgaaagcgccgagaccgcgcagctgatccggctggggcttaaggaattgtcgaagtgaacacgccgccccgcatcgtgacacccgaacgccgctccgacgatgtcggtgacaccgcgctgcgtccgcagtcgctgactgaattcgtcggccaggcccaggcacggaagaatctttcgatcttcatcgaggcggcgaagaagcgcggcgaggcgctcgatcacgtgctgttcgtcggtccccccggcctcggcaagaccacgctggcgcagatcgtcgcgcgcgagctcggcgtcggcttccgcgccacctccggtccggtgatcgcgaaggccggcgacctcgcggcgctgctcaccaatctcgaagagcgcgacgtgctgttcatcgacgagatccatcgcctcagcccggcggtcgaggaagtcctctatcccgcgatggaagatttccagctcgatttgatcatcggcgaaggccccgcggcgcgctcggtgaagatcgagctgtcgaaattcacgctggtcggcgcgacgacgcgcgcggggctgctcaccaacccgctgcgcgatcgtttcggcattccggtccggctcaatttctacaccgtggaggagctggagaagatcgtcacccgcggcgcccgcgtgctgaacatcggcatgagcccggatggcgccaacgagatcgcgcgccgcgcccgcggcacgccgcgcatcgccggccgcctgttgcgccgggtgcgcgactttgcctccgctgccgatgcggactccgtcgatcgcggcatcgcagaccgggcgctcagcgcgctcgaggtcgacagcgccgggctcgatgcgatggaccggcgctatctcaccaccatcgcgctgaactatggcggcgggccggtcggcgtcgagaccatggcggcggcgctgtccgagccgcgcgatgcgatcgaggacatcatcgagccctatctgatccagtgcggctatctgcagcgcaccccgcgcggccggctgctgacctcgcatgccttccgccacctcggcctcgccgagccgaaccgcgatccctcgcagttcggcctgttcagcggcaacggcgacgaggattgaactcaaagctctcgaagacgtgaagaagcgtgttggtgcagcgcattgcgccgccggtaaccttgcgcgctaaccatcgcggcatctctgcaggccgtctgcacaaacggggcccaatttcgctccaatcaaagggcctatgttcattcaggcatcaccgatcacatgtccatgatctcacgtcgtcattttcttcgcggcttcggcggattgaccgccgcctccgcttcgaccgcagcctacggcgtcagcgagccggtcgtccggctcacgctgacgcgctacgatctgtcgccgcggcaatggccgtcggactttccgctcaggatcgcagccctcgccgacatccacgcctgcgatccctggatgtcgcttgatcgcatcgccgagatcgtcgaccgcaccaacgcactgaaccctgacatcatcgtgctgctcggcgactatgtcgcgggactgcgccacgtcacgcgcttcattccggcatccgaatgggccgccgtgctcaagggcttgaaggcgccgctcggtgtgcacgccgtgctcggcaatcacgattactgggaagacaagatggtgcagcgcttggggcagggcacaccggtcgcgcgccgcgcactggagcgcgccggcatcccggtctacgagaacgacgcagtgcggctcgtcaaggataaccgcccgttctggctcgcgggcctcggcgaccagctcgccttcatggcggcgcggccctatcgcgagatcaggcgcgtcggcgtcgacgatctcaacgggacgctcgcgaaagtcaccgacgatgcgccggtgatcctgctcgcgcacgagcccgatgttgcgctccgagtgccctcgcgcgttgcgctgcaactgtccggccacacccatggcggccagatccggctgctcggctggtcgccggcggtgccggtcaagcacggcatgcggctcgcctacggccacatcaagctgaaatgcgacgtcgtcgtctccggcggcctcggctgcagcatcatgccgttccgcctcggcgtgccgcccgagatcgtgcaggtcacgctcggcggaaaggggccggtggtgtcctgatcgcgcttgcgtgatcggataatttgcgcaacacgattgctctccgaggcaatcgaggggccgcaattgaccttaccccacatcgacggcgcgatccgtgatggccgacaccatatgcaggtccgtgtctattacgaagacaccgatttttccggcatcgtctaccacgccaattacctgcggttcatggagcgcgggcgtaccaatcatctccgattgatgggggccgaacagaacgcgctgttcgaggaggcgcaggaggagaccggcggcttcgccttcgtggtgcgctcgatgacgctcgacttcctcaagcccgcgcggatggacgacatgctcgatgtcgtgacctggccgatcgcggtgaagggcgcctccatcatgctggcgcaggaggtccggcgcggcgatgacgtgcttgtgaaggcccaggtccgcgttgctttcgtcagccagggcagggcacagccgatcccgaagtccatccgtgcgctgatgaaggccgatctagcttagttattgggcgataggaaacgccccatcgactccatgcggcgcgacgatagatttgcgcgtgacagagcgcgatcagattgatcgcgcttgtcttctatttcgagcatgatcttttcggaaaaccgcttcacacttttccggatcatgcttcaacaacgagggatcgccgatgtcacgcccgccgctgccacctttcacccgtgagaccgccgcgcagaaggcgcgcatggcggaagatgcctggaattcgcgcgaccccgtccgggttgccagcgcctataccgaggacagccgctggcgcaatcgctccgaagtgtttcagggccgcgaggcgatcgtcgctttcctcacccgcaaatgggagaaggagcaggactatcgcctgatcaaggatctctgggcgttcgacggcaaccgcatcgcggtgcgcttccagtacgaatggcacgacgccagtggcaactggtttcgctcctacgggaacgagcagtgggagttcgacgagcacggcctgatgcgccgccgggaggcctctatcaacgacatcgcgattgcggaaaaggaccgccgcttccattggccggcgcccggcccgcgcccggcggatgtgccggggttgggggatagtccgttttagttgtcgtcccgacgccctggtgagcgatcgcaccgctcccggattgcgctgcgcttaatccgggctacgggatattacccggccgatcgaaagcgtttgcaagtctcgatcaagatcggtttattcggcgattgcaacctcaacgcgtccgccggactcatttcatgtcaattgaacgttctacagcccttgtgctcacgggcgtcctcctcgcgagcgcttttttagccattccaatccagccaagcgcggcgaagagtgagatgcgcgggcccgacacctggggatcgatgttcaggcatcagatcgagaggtgttggaggaagcctgtacgcgtcggtgacgaggccgcgagcatgaaggttgagttcgtggtcaagctgacgcgagagggtaaactggatgggcaacccgaggtgctgccggggagcaagtcggccacgtcagattatgcgcgagcctatcaagcgagtgcgctgcgagcgatcaccgactgccagccgttcactttgccggccgaatattacgatcaatggaagcacttccacccggtctttatggaatggcccgcagggcaggggcaacctgccgctggggagctcgatacgcgcaagctttcgatttgccggggatgctgaccgcggcgcgcaggctaccgcgatacttcacctcgccccgcttgcggggagaggtcggatcgcatcgtcagatgcgatccgggtgagagggagtctccgcgagttcgtctctcagcgacctcgtggagactccccctcatcccgaccttctccccgcaggcggggagaaggagaagcttacgccgccgccttgtgccgcgcgatctcagccttgtagagctcgaattcttccgcgaccgccttcgccaccgaaggccgggcgcgcaggcgttcgtaataggccttcagcgccggccatttcgcgagctcgatcggcggcgtcgccatggtccagttgatcaccgtgacgagataggcgtcggcgacgctgaaatgatcgagcaggtagtcgcggcccttcagatggtcctcgacatagtcgagccgcgagacgtatttctccagtgcataggacttggcctccggcggcgccttcttgtcgagcagcggcaggaacaggcccttgtgcagctcggtgccgatgaagcacagccattgatgcagcttcgaacgttcggcgttcgacgcggtgccgaggccggcccgcgggaactggtcggcgacatattgcaggatcgcggcgttctcggtcagcaccacgccgtcgtcggtgcgcagcgtcggcaccaggccaagcgggttgaccttgctgaagtcggagccgtcgttgcgtacctgcttggtcttcggatcgacctcgagatagttggccggctggccggcttcatagagcgcgacgcgggtcgccatcgagcacgcgagcggcgagaaataaagatccatgggagcctccagtatctggcgcgggggtccggccgttgttgatttttgtactgtcctggataatatttgtggcgtcaaggaatttagtgcgaaatggtacaaaaaagtaagaagccaccatctactgccaaaattgcagcacccgttgcgccgaagcggcgcgggcggccgcgcgcctatgagccggatgtcgccctcggcaaggcgctcgatctgttccgccgcgatggctttgccgcgacctcgctcgatgatctgagcgccgcgaccggcatgaaccggccgagcctctatggcgcgttcggcgacaagcgcgagctctacatcaagagctaccagcgctatcgcgatgacgcgcgcgccgcgatggccgacatcttccgcgacgatgcgccgttgcgcgagcggctggagcgcatctatcgcatcgcgctcgacatctatctctccggcgagtccggcccgcgcggctgcttcacggtgatgacggcagcctcggaggcggtgtcggatcccgatatccgcagcatggtgctggagggcctaaccgagctcgacaaggcgttcggcatctgcttccgccatgccaaggagcgcggcgagctgcctgagggcgccgacccggcggcgctggcgcaccttgcatccgccaccatccacacgatcgcgatccgtgcccgtgcccgcgtgccgcgcggggaactcgaggcgatcgtgaagggggccgtcgacctgatgtgccgggcccaatagaggcggcaaaaattcttcagcagtaaatgtcgggttctggttttccgacccgtcttccgtaaggtctccccgctcacggaaacggaacatcatgggaaaagtcaggacttcagcattctcggtctcgatcgacggatttggcgcggcaccgcgtcagagcctcgaaaatccattcggcgaaggcggcatggtgttgcccggctggttcctccagacccggacattccgccagaccttcggccaggacggcggcagcaccgggctcgatgacgagatcgcgcgcaagtcgatggaaaatatcggcgcctggatcctcgggcggaatatgttcggcccaatccgcgggccgtggccggacgagtcctggaaaggctggtggggccccaatccgccgtatcacacgccgacctatgtgctgacccatcatgcgcggcccgacatccaaatggaaggcggcaccacgtttcacttcgtgacgtcaggcattcacgtcgcgcttgagcgcgcgcgcgcggttgccggggacaaggacatccgggtcggcggcggcgtgtcgctggtgcgccagttcctggaagcgcgcctgctcgacgaggtgcagctggcgctatcgccggtgctgctcggcgccggtgagaatctgttcgcaggcctcgacctgcctgcgctcggttacgccgtcgtctcgcaggtcgcgagcccgaacgcgacccacgtcaccttcgcgcgccaatcctaagatcgttcacgcctgcgtcagcggccaacatcggcggttgacgcgggcgcagttcggtcgtatttaacccaaaggttatttaaccgatgagctaagtacgaacatgccgctggaccccctcagttcgaccttcgcggcgctggccgatccgacccggcgcgcgatcctggcgcggctcgcgctcggcgagacctcggtgatggagctggcggagccgttcgacatgagcctgccggcaatctccaagcacctgaaggtgctggagcatgccgggctgatctcgcgcgggcgcgaagcgcagtggcggccgtgccggatcgcgcccgactcgttcaagcaggtcgatggctggctcggaaatttccgccgcttctgggatgagagcttcaaccgcctcgatggcctgctcgaggagatgaaggcggaggaggccgcaaaggctccgccgcgcaacacccgtaaaatcagagtaaaggagaagcaacgtggacgcacgcgtgaataagacgctgaagatcaccaccccgtcggatttcgaattcgcgatgacgcggcagttcgacgcgccgcggcgcttcgtgttcgatgcgatgaccaagccggaatatctggtgcgctggcttggctgcgagaccctcgtgatgccggtgtgcgaggtcgacctgcgcgtcggcggcgcctatcggttcgtgttccgctcgtccgagggcatcgagcatgaactcgccggcacctatcgcgaggtggtgcgccccgagcggctggcgttcggcgagaccttctcgatgccgggcttcaccagcgaggaatatctcgtcatctcgaccttcgtcgaggaagccggcaccaccacgctgaccaccaccatccgccatcccaccaaggaggcgcgtgacggccatctcaactccggcatcgataagggcgtcgcgcccgcctacgaccggctcgccgaggtggttgccgagatgggctgaggggtgaggttgcagccgatctgcttgtcgtcccggcgaaggccgggacccgtaaccacaggacatcgttgttgtgcaggatgcctcccccgcgtgccccaatgaggggccgcggggtatgggtcccggccttcgccgggatgacaccgtttgtggcgtggcggcgctgctaatacccccgcttgcgatcgaccacgttctccagctccccgttttgctcgaagcgcgcgatctgtgccgcgacgtatttcgagatatcgtcggcgtcggtgtcggcggcattgtgcggcgtcagcaccaccttcggatggctccagaacgggctgtcctgcggcagcggttcggtctcgtagacgtcgagcgaggcggcacccagcgtaccgtcgtcgagcgcgcggaggatatccgcctcgttctgcaatccgccgcggccggcattgatgatcacgggtgcgccgagcgggctgttgcggttcagcttcgcgaacgcatcgcgattcagcacatggcgcgtgtccggtgtcagcggcagcaggcagaccaggatgttggtcgcgcgcaggaacgcgtcgagtccgtcggcgccgtggtagcatgcgatgccgtcgatccgcttctcgctgcggctccagccgacgacgcggaagccgagcgcgcgcagcgcctgcgcggcggccgcgccgagcgtgccgagccccatcacgccgacggtgatcgcgttcgcggcccattgataatccggcgcccagcgcttcaatcgctgcgactcgcgcaagtacggctcctggcggtgatgcatcagcacgtgcaacacgacatattcggtcatccggccggtgaggtcggagaccgcaacgcgcaccagcggcacgtcgggcagcgagcggtcggccatcagcgcgtcgacgccggcgccgaggttgaagatgacgcgcaggttcttgaacgcggcgagctcgcccggcttcggcttccacactgcggcatagtgcacctcggcggggtccagcgcgccgtccggcagcagcacgacggggcggtcggggcagaccgcgtcgaaccgcgccttccagcgcgccgacgaccagttttccgagccgccattgatcagcagcgccaatgcgcccttgcccatccggatacctccaatttcaatgtgatctatatcacagagcgaagccgacccgctccctagtctcctgccatcaaccggggagaacttccatgcgcaaactgatcctggccgcggccgtcatcgtcgcctccgccgccaccgcagacgccggccagagccgtggcctcgtgctcgcgaacgctgatgcgcccgcccaggcgcaaccggccgttgctcctgatcaggccgaggcccagccggcgccgtcgcaggcccagccggccgaggcctcgagggcgcaagcgtcgcgtccggtgaagcggacccagacgagccgccgggagagcgatgaagccaaggctcgccggatcgctgcccgctacggcgtctactggtgatcgcagcgtcctcgtcgcggtgatggccgaggcgcgccaccgccatggctttgcaacgcgcctcggccaaattcatcaccggcgtcaggaaccgagatttctttcgctccgcctgtcggcagcgggcataatcgttcgttcttgcaatgaacggagatgccttttcgatgctgtacgccattctctgctatcatgacgaagacttggtcggctcctggagcaaggagcacgacgcctcggtcatgcagaaactgtccgtcgtgcaggataagctcgccaagcagggcaagctcggcccggtggcgcggctgttgccgaccaccgcggcgaccacgctgcgcaaggaaaacccgccgctggtgctggacggcccgttcgccgaaaccaaggagcagctgctcggcttctacctggtcgagggcaagaatctcgacgaggtgctcgatatcgcgcgcgacctcggcgaggccaatcccggcggcacctatgagatccgtccggtcggctacttcactccgggggacgcaaagccgtgagcgtgaccgacaccgcctggatcgatgccgcgctgacgtcagcgcgtccccaggcggtcggcgcattgctgcgctacttccgcaatctcgataccgccgaggaagccttccagaatgcctgcctgcgggcgctgaagagctggccgcagaacggcccgccgcgcgatccggcgtcgtggctgatcatggtcggccgcaatgtcgcgatcgacgacatcaggcgcagcaagaagcaggaagcgttgcccgacgacgaccgggcgatctccgacctcgacgatgccgaggacgagatcgccgagcggctcgacggctcgcactaccgcgacgacatcctgcggctgctgttcatctgctgtcacaaggacctgccggcgacccagcagatcgcgctggcgctgcgcatcgtctccggcctcacggtaaagcagatcgcgcgcgccttcctggtctcggaagcagccatggagcagcgcatcacgcgggccaagacgcgcgtcgccgacgccaatgtgccgttcgagacgccgggcgcggtcgagcgcagcgagcggctcgcctcggtcgcggcgatgatctatctgatcttcaacgagggctactcggcgagcggcgacaccgccgagatccgctcgccgctgtgcgaggaggcgatcaggctcgcccgcctgctgctgcggctgttccagagcgagccggagatcatggggctgaccgcgctgctgttgttgcagcacgcccgcgccgccgcgcgcttcgatgcggacggccaggtgatcctgctcgacgaccaggaccgcggcctgtggaaccagaagctgatcgcggaggggatcgcgctgatcgacaaggcgatgcgccaccgcaagagcgggccctatcaggtgcaggccgcgatcgccgccctgcacgcccgcgcggaaaagcccgaggataccgactgggcccagatcgacctgctttacggtgcgctcgaggtcatgcagccgtcgccggtgatcacgctcaaccgcgcggttgcggtctccaaggtgaaggggccggaagccgcgctcgagatgatcgagccgctggcgccgcggcttgcaaactacttccattatttcggcgtgcgcggcgccttcctgatgcagctcggccgcaacgaggaagcccgcgtcgccttcgaccgcgccatcgcgctcgccaacaccacagccgaagccgcccacatccgcatgcatatcgaccgcctgatgcgcgacagccagccgcgcaatgcgaaggcgaagtagcgggctagcttggtcgcgtatggttcgtgtccagctgagagacttcccgtgtgacacccctctccctacccctcccccgcaaggggggagggaacccctccgccggtgcttccctcacgacagcgcaagagcatagctagtcaatcgcgtcaggtgagcacgcaggtcaggcaccctcccccttgcgggtaggggaatcgcatatggcgatggaggggtgttgccaagcggttggaactggattctttgggtgtctctcgcttcccgagggagaccagaatgcgccaactcaagcgcctgcttcgaccactcaaggacccccgcgccagcaacgtgcggcacgatctggtggagatcatcgtcatcgccttggcggcgacactggccggcgccaagacctgcaccgagttcgagttcttcggcaaaggccgagaggagctgttgcagcggttcctggagctcagatccggcatccccagccacgatacgttcagcaacgtcttccgtgctctggacccgaaggggttggaagcgattttgcgcaagctcagcaagggcttcggcatcaagggcgtggtcagcatcgacggcaaggcgttgcgcggcgccttcatgcgtgggcggcaatccacaccgctgcatatggtcaatgtctgggcggcaggcacacgcatggcgctggctcaaaggaaggcccccaatcgcaacgaggttgccggcgttctcgaagtcctcgcctcgctcgatctggacggcgctcttgtcactgccgacgccttgcattgccggcccgatgtcgcgca

SEQ ID NO: 12 - DNA, 174999 bp, Bradyrhizobium enterica
gcatcctcgagcccggtcagcagcagcgccagcgtgctggttccggccagcagcatcgagcgggacaccaatccgatccgctgccgcggcggcagcggcgcaacccgacgctgagcgaggcgggaacggtcggcggctttccgggcgcgcgatgggcgggagatcacacggtcgacgaacatgaggcatcctgactaggccaaatcgcgatcactgtgatgaccgcgggctcactgtcgtgacacctccggacgtcgacgccctcaaaggttttttatgaatgttttgtgtcacacgcgcgagcgtcagagcgcgttcgagcaaggccgcgccctggaactgaaacgcgtggaacacgtgttgcgcgcgacaaaagcgctaggaaagcaggacaagcccgccgggcaagctgcgggcgcgaatgccgaacgcacgctcaatctgcagcaaggcctcgtccggacgatcgatcctgaaacgaccgttgacggggctgcgcccgaactccgcattcagcagcacgatgcggccggagcggtatctgttcaattccccgatcacctccgccaacggtgtcatgttgcagatgatcaggccctgttgccaggcggcggcaatcgacggatcgatcgcgacgacatcgccaaatccgccatcgccataggtgacgcgctgcctggacttgagaacgacttgttgcgccagatgctccacatgcgcttcgttcgcgaggcacgtgacacagacgctcgccccgtcgacgcgcacgtcgaactgcgcccccgtcgacgtggtccttccgcccgccgcgatcacgctgaatgtctcggctcgccgatccgcgaccttgaaagaggcctcgccggcgatcagttcgaccgtgccggacgcagctcccgatccgagcgagatgctggtgcgcgtgttcatctggaccgcgacgccgtccaccacggccacctcgcgctgctcgccgacgccggtacgataatcagcgcgcagttcgaacagcgacggccacagatcgagcggagggtgcaccaccatgatcccggctgccgtggccgccagcgcacctccgatgatcgcacggcggctggtgatcgccgtcctgccgccggcgggcgcgcggcggcccgtcgtcctcgaatccgcgagcaggctctggcccgcggggccgaacgccttccagaaccggctggcctccgaaaaagccgccgcatgcgccgggctctggccgcaccagcgccgcaaggccgccgcgtcggacgccctcgcctctccggacgtcagacgacgaatccaggcatgggcttcgcgctcaagcgcggaaagctcgtcgtgatgttggtcgctctcaatcatcaacgttgcatgttgccggtcgtcttgaagcccgtggtcgcaatgctctgcgggcgagccggcggccctcccgtaacatagacactccagaggacgcgaaccgcacaattttctactccgggcgccggattttcttgaaacgggcgacgcaatgctcctgcgccctccgcaattccttctccaccaggctcacggaaatgccgaagcgccgggcaatctgctgccgggacagcccctccagcctggcggccagcaggatggcccgcggccgcggtggcaattccgccatcacctgcttgagcctttcgagatcggagcggccggagatcacgcgcacggcgtcgggtgcatcgtccgccagattgagcagcgcctcgacctcttccgcattgaggcgccggttgtcggcgcgccgctgattgagcgcgacgtggaaggcggatcgaagcaggtaggcggccggattgcggacatcgccgacgatctcccggccgttcaggcgcagataggtatcctgcagcgcgtcttcggcccattccagcgagcccagtcgacgcgcaaggcgcgatttcaaatcctgatagcgctcgatcaacagggcccgcaacgtgcgcgcgctctcattgtccgcggcctcgtcatgatccgacgccttggagaggctctcgccctcactcatctcgtcggccgccttcatccggcggacagtcgacggtaccgccggacgcccggggcaggatcaccatggtgaagggttgcgtcatctgcacagggggagcttcgcccgcggatacgcgatttgccgcctccgcaatcgctgcatcccgttgcggatcgccggtcgtccccaaaagcttcaccctcgtcacactgccggacggcccgatccagaagctgattgcggcccggtacgcaccaggccttgtcgctcgctgggcgcacagggcattgttcagccgctcctgtagcagcgccgaatatcgccgttcaatagcgctctgttgtgacaaggccgcttgcgcgatcgccgccggcgaacgcgtcacaaaagtttcattcggcgcgggaacgacgacgatggcatcgggtgccgtgtagtccgcgaccagtccgctgccctgcagaagcagcaggatggcctgctgcggattgaactgcccctgcaccgggttcgagacccggccgaccgccagattgccgttataggcgatgacgacgccggtcgtcttgctataggcgtctagtgccgatgcgagcgattgcgcgggaatgtcgaaccaagcctggctcgacggttgagcggtttgcgccgataccgcacaagcccagaacatgcccagggagaaaaggccgcagaaccagaaacgccaccgaaacggcatgagatgcagacatcattatcccgggtgaactccgcctatcccatagcgtctgcaaaggtcttgagccactccccttcacgtaggtctcccatcattgtggcgcaccgacgtcgcggcgcggaacctgaagccggtctttccgggatcggctgagtatcgcgccagcaccttctgcacgacaccacggcaacgacgagcgccgcgaggcgattgtcatttcctgcgaaacgagacgagcgagcgcttgctgcttcagcatcgcagcaccaaaccgcgaccgcggccaccgcatacaaccatgcggcgatgaagcgaagcggccgcgccagtcgagcgccatcatcgcgagcgcagaccgtgatggtgacaagggctcggtcaacagccgacaaacatgtccgccaccggccacacgcggcgaccgacctccgccttcgccctcgggctacaccgggacgaccgtttgcgtgccgttcgtgcggactacggtcagagagagggggatggtgcccaggggcgggatcgaaccaccgacactgcgattttcagtcgcatgctctaccaactgagctacctgggcatacaagctgggccgaaaaggccggagcgagcgggcggtttatagagaggtcggagcgctgtgtccacccggcttcgcgaaacgcttcgccgggcgcggcccgccctgtgcaatttccccaacttattgggaaatcttggctattccgggtcctccgcgtcgtcctcgcggccgggaacgacatagcggccggtcagccagcggttcaggtcgacatcgcggcagcgcggcgaacagaacgggcggaaggcctgcgcgaccggcttgccgcagatcgggcaggcacgcgtggtcgggggcgttcggggctggtcggtcatggctcggaggtagcttacatcaatcgagatgcaagggcgctgagggcacgaggttcctcggcctcacaccgcgacggcgttgagccagccgtggcggatcggaaagccttcgccgccgagcagggtcacggtctcgtagagcggcaggccgacgacgttggtgtaggagccgaccatcttgaccacgaaggatccggcgatgccctgcacggcgtagccgccggctttgccgcgccattcgccggagccgatataggcctggatgtcgtcctcgctgagccgcttgaagcgcacgcgcgtctcgaccaggcgctggcggaacgcctcgcgcggcgtcaccacgcagatcgcggtgtagacgcggtggttgcggcccgacagcagccgcaggcactgcgcggcctcgtcgaccagattggccttgggcaggatgcggcggccgaccgcgaccacggtgtcggcggcgatgatgaaggagccgcgcagatcgtcgtcgagctgaactgacttcagcgccgcgtccgccttcgcgcgcgccaggcggttggcgcaggcgcgcggcaactcgccccgccgcggggtctcgtcgacatcggccgggcgcagcgcgtcgggctcgatgccggcctggttgagcagggccagccgccgcggcgaaccggaagcaagaacgaatttgggacggcctagcatgcgggcttttgggctgaatcggggggacggacgcgggcggaacctatcggatggggcatggatgcacaaccttggaaccggtcgcgaatcgtactcccgcttggagacaaggccccataagcacagctgtttgtcagtctggcgacaaggggcggtcctgcgaatcggaacacgccgcgtgttcgcatcacaagttcgccgcagccttggcgaagcggcggcggatgcgcatcaagaggccgtcgcagacctcgcgataggcggcgagcttctgctcgcgattgccgctggtcccggtcgggtcgtgcgtcggccagtattcgacatcggcggcgagcgtgcgcgtcaggtccagcgccttgtggtgcgcctccggcgagagcgtgatgatgagatcgaagttcaacccctcccagtcctcgagctcctcgaaggtctgcggcttgtggccggaaatgtcctggccgaactcggccatgacggagaccgcgaacggatcgagctcgcccttcttgacgccggccgaacgcacatagagcccttgcggaaacatctgctgcagcaggctttcggccatcggcgaacgcacggcattgtggccgcatgcgaacagcacggcctgcggggtgcgcgcgcttggcgctgccatgcgatcaggcttttttcgaccggggtacgcccccgtcgtctggcgaagtgacgataagcgggatcatgcgccctcacccttccagtgcagcacagtgatcagcgtgaacagccgccgggcggtctcgaaatcgacgcgcaccttgcccttgagccgctcctgcagcgtgcgcgagccctcgtcatggatgccgcggcggcccatgtcgatcgcctcgatcttgtccggtgtcgcggtccggatcgcctgatagtagctgtcgcagatcatgaagtagtccttcacgacacggcggaacggcgtcagcgacaacagatgcgccacgacaggcgagccgtcctccttcctgatatcgaacatcagccggttgccggtgatcgcgatatgcagggtatacggacccggcccggcgacgccctcgggcgcgaacaaattctgctcgaccaggtcgtagatcgcgatcgcccgctcatgctcgatatcgggcccggaacggccgatcgattcctcgtcgagcgtcaccgcgacgatgcgattgttggaatcctcgtcgtctggtggcttggtcatgagaggttgaggcgcaatccgacggaacgtgaatgggcatcgagaccctcggcctggccgagcgtcatcgcggcaggcccgagcgcacgaagctgatccggcccgcaccgcaggatcgaggttcgcttcatgaagtcaagcaccccgaggcccgaggagaaccgcgccgagcgcgccgtcggcagcacatggttggagccgccgacatagtcgccgatcgcctccggggtatgggccccgaggaagatcgcgccggcattgcggacctttttcgacaggccctcggcgtccgcggtcatgatctccagatgctccgccgcgatcgcgttcgcaagctcgaccgcgtcgtcgagcttcgccaccttgatcacggcgccgaaatcctcccacgaggcgcgcgcaatcgccgcacgcggcagcgtcgccagctgcgcctcgaccgcgcgctcgacatcggcggcgagccgcgcactgtcggtgaccaggatcgactgtgcgctgacgtcgtgctcggcctgcgccaacagatcggccgcgatccagtcggcattgccggtatcgtcggcgatgaccagcacctcggaagggccggcgatcatgtcgatgccgaccttgccgaacaccagccgcttggcggcggcgacataggcgttgccggggccgacgatcttggccaccggcgcgatcgacgcggtgccataggccagggcggccaccgcctgggcgccgccgacgcggtaaatctccgaaacgccgccgagatgggcggccgccagcaccagcgggttgagcttgccgtccggcgccggcaccaccatcaccacccgcggcacgccggcgaccctggccggcaccgcattcatcagcaccgaggacggataggccgcggtgccgccgggcacatagagcccgaccgcatcgaccgcgctccagcgccagccgagctcgacgccggcggcatcggtgaagcgctcgtccttcggcagctggcggcgatggaacgtctcgatccggtcgcgcgcgaagctcagcgcctcgacggtcttgggatcgcaggccgcgactgcggcatcgatctcggccggcgtgatgcgcagaccggcggcggtgatatcgagccggtcgaacttcctggtcgcctcgagcagcgcggcatcgccgcgggcggccacatcgtcgacgatggcgcgggtggcgcgctcgacgtcggccgatacctcgcgcttggccgccaggaaatcgcggaaacgctgctcaaaatcggcgctctgtcggtccaggcgaacgggcatggcggctttcttaggaggaattcgggtccctgctcaatggcgcgacggataatggccgtcaacccttggctcccgtcgtccaggcgaaagccgggacgacggccgagagttacccaggccccaccccgaggtcgtctggccccagatcggtcaattcgcactccaggcattcgacatcgagccgcagcgccgcgccctgaccgaacatcagcagcgcgctgccgccaggcgggtcggaggcatggaattcgatcccgagcagttccagggtcgcctccggggtctccaggtcgatgttgcgcgacttgcatgccagcacccggtcgaacctgagtgcggcgatcagccggcgcgagcaggtgccgccggacagggtctgctcccaatcgagccggttcaggccgaccacgaggcgtttctcgtcctggcgccagacgatgtcggcaggctggacgcgggcgtcctgcagatgggcggagatcaccgcgaggtcatcggcgtcgagggcgatcagtttcagcggcgcgggtggggacatgacggtgactataacgcctcgcggcctcggaggtaccagtggccgcaaggaaatcccgctcgagggaaccggcaagcgcacgagcaaaatatcgaaaataaccccatgcaaaggggctggaagcggcgtggcatgccccgaccgaacgtacgcgcattggcactcttcgtcaggtgagcacgctcgtcaggctccctcccccacgcaaccggggtataccgcggttgcgcatcgcaagtttgcgcaagtcgggcaggcccgacttgcgtcgggggagggttggggagaggggtggccccgggcgagatgagcgacggcgcagttggtcccgcaatctcggctgcatgatcagaggcgcatttcgagagagcacccgtgtggccacccctctccctaaccctcccccgcaaggggggagggaaccctaccgctggtggctccctcacctagtcgcaccgacctgcgatggtgtttgcgctggcctcaccccgtgatgaacgccagcagatccgcgttgatggtctccgcttccgtcgtcggcatgccatgcggaaagcccttgtaggtcttcaagcgtgccgttcttcaaaagcttggccgagagcgggccggaatcggcgtagggcacgatctggtcgtcgtcgccatgcatcaccagcaccggcacgttgatcttcttcaggtcctcggtgaagtcggtctgcgagaacgcgacgatgccgtcgtgatgcgccttggcgccgcccatcatgccctgccgccaccagttctggatcacggcttcggacggttttgcgccgggccggttgtagccatagaacgggccggccgggagatcgcggtagaattgcgaacggttggccgcaagctgcgcctgcaagccgtcgaacaccgatttcggcaggccgccgggattggcggccgtctgcaccatcagcggcggcaccgcgctcaggatcgcggccttcgcgacccggctctcgccgtggcgcgcgatgtagtgcacgacttcgccgccgccggtggaatggccgacatggacggcattcctgaggtcgagatgcgcggtgacggccgcaaggtcgtcggcgtaatggtccatgtcgtggccgtcggcgacctgggcggaacggccgtggccgcggcggtcatgggcgatgacgcggaagccatggttgaggaagaacagcatctgcgcgtcccaatcgtccgaggacagcggccagccatggctgaacacgatcggctgacccgaaccccaatccttgtagaagatctcgacgccgtctttggtggtgatggtgggcattgaacgctcctcctgttgccgatgtgttggtccggcacgccaaacatgagcggaccccgagcgacggcgtgtcgccgacatgccaccgcccttcgccttctacgccgtgcgtcgctccgaattgatgtcacccgccccggatcaggcgaaattgaccggcctgaagcggcgccaggcgccgatgatcatcacggcgaagaacaccagcacgatgccctgcaccgccccgaacaccggcccggacggcgggttcggcggcaccgccggcgccagcgcctgcaacgcggggatcttgaggaagctctggatgaccaacacgaagacgttgagataaagcgagaccatcgcggtcacgacatagatcgggcgccatgcgcccttcagctgcatcgcatagagcgcgatgcaggcgatcgccagcagcaccagcgagaggccgccgatgatctgggacggcagcaccttttcggtaatcagtggcgggatcacgaagccggtggcgctggtcaggatcgtgaagatgaggaagatcgcggtcagtccgggcatcgggcgcgagccgagcaggccgaacatcacgatcacaccggcgacgatcgcgatcaggctgataatgacgtgcacaagcaccaacgtcgtcatgtagcacactcccccgttgagacccgcacgacgttacgatgcgtctttgaaaattgctacatcgttcgatggcaggacgcccgacactcaagaaaatcgctgacgccgaccgttgcaaaaccttggtgtcggcgtcgcgcgccgcggcatcctgtgagaacttgaatcaatagaagcgcgggatcggcccatcctgcggcgtcttgcgcttcgacaggtcgaacagcacctcgtcgacatagcaccagccccagccttccggcggatcgtagccctcgatcaccggatggccggtggcgtggaaatgcgccgttgcatgccggttcggcgagtcgtcgcagcagccgacatggccgcaggtccggcagatccgcagatgcagccagcggctgccgctcttcaggcactcctcgcagccgcgcgcactcggcgtgacgtcctggatgccggcgatatgggtgcagccttttggcatttgcgggcctctcgttctgaacggtcgcggatctatctttatccgcacctctttgaaccgtcatccccgcgcaaaggcgcggggatgacggggatggtgcagcatggctttccactacaacgtcggactgccggcatcggcgagatagccgtgcagcgcggcgaccacctgtgcgccctcgccgatcgcgccgccgacgcgcttgaccgatccggagcggacgtcgccgaccgcgaacacgccgggcaccgtggtctggagcagcggcacggcgggcgcgccctcgccgttctgtacgccggtcttgacgaagccgccgcggtcgacctgcacgccgcagccctcgagccagccggtggccggatcggcgccgacgaacaaaaagagattgcggatatccatcgtgaactcgtcgggtgcgagccggctgcgccagcggacgcgctccagcgtctccgcgccgtcgaggccgatcacctcggtgttgaacatcagttcgatgttcggcgtcgcctcgatacgctcgatcagatagcgcgacatgctggcgccgagcccgccgccgcggatcatcatgttgaccctgcgggcatgcgcggacagatacaccgccgcctggcctgcggagttgccgccgccgaccagcacgacgtcctggttggcgcacagccgcgcctcgatcggcgaggcccagtaccagacgccgcggccttcatagtgctcgagattgtcgatcgccggccgccgatagcgcgcgccgcttgcgaccaccaccgatttggcgcgcagcgtgtgcccgcatccggtggcgagcgtgaacgcgcccgacgctttcgagcagtcgagcgatttgatcgagaccgggatcagcatctcggcgccgaatttctgcgcctgattgaaggcgcgtccggccagcgcctggccggtgatgccggtcgggaatcccagatagttctcgatccgcatgctggcgccggcctggccgccgaaagcgcgggaatcgaacaccgcgaccgacaggccctcggaggcggcataaaccgcggtggagagcccggccgggccgctgccgaccaccgcgacatcgtagagcctgtcttgtgcactgttgccgatcatgccgagcgccatcgccagcgcggtctctgatggattgcgcagcaccgtgccgttggggcagaccaccagcggcaactcggcacgcgtcggcgaatagcgcgcgacgaggtcggcggcatcggtgtcggcctcgggatcgagcacgtgatgcggctggccgttgcgcgccaggaaattctgcagcggcgccatgttgccggccgacgccgagccgatcagcaccggcccgccggcgccgccctggatcaggctgacgcggcgcaggatcagcgcccgcatgatgcgctcgccgaggtcggcttcggcgaccagcagcgcgcgcagccggtccggcggcagcagcaatgtctcgaccgcaccgtcggcatggccgtcgaccagcgccgcgcggccggagagctggccgatctcggcgaggaactggcccggcccctggtcgatgaccggcgtgacacggccgaggccgtcgcgctgggtgatcgcgacgctgcccgacagcaccacgaacatgccgggccccggcgtgccggtctcgaacaacgcctcgccgtccttgtatgaccgcggctcgccgaagcggcgcatccgctcgatctcatgcgccgtcaaggtcggaaaggtctgttcatggcgcgggaaggcggcggcggttgcgctcaggcgattgatcgtcgtctcatcgattgcagtcatgtcggcgccccgcttctctttgcacacacatccgagccgggttagcggcccggctcgtttccgccggcgtgatccggcgcgccgtgatctagcgagccgtcagccggttcggaagccacatcctcgcgaccgcgcgcctgggatttccgccgcttcaggttctcgcgcagcgccagcttgagccgatcctgtcgtgaatccttcacgcgggcaccagcctgcccgccgcctctgtcctgatcgcccgtcatctggaaaactctcgaaccgccgacgccttgcgccgcgccgagcatagacaatgaccgccgccggcgcaccctgcccggtcggccagttgcgcgcgacggcatgattcggtggccagtggatcggacgccttccggcacgatctggaacccaatcgagccaaattcggccggattggacgcaatcaccgccgcggaacgtcatttctgccgatttgcccggcaagaggagcgctgtttcgcttgcgccaaggggatgcctgtggcaagaaccgcccgcttggacgggcccttggggccgattcaatttttcccgggcatgctgccgtagctcagtggtagagcactccattggtaatggagaggtcgacagttcaatcctgtctggcagcaccaggatcttcgcacaacgatcgccgcgatgagcacgcgcccggccgcgtcagccgaatcaatgcgcgagcagcaggcccaccccgccgatcaccagcacgacgtagaacacgaacacactgccgacccatttccaatcgatctgtgcgtgttccgggctcaggctctcgatgatgccgtgcatgatggtttcctttgaaagtcgcatatgcggcgtatagaccgcagctcgagcacgtcatgtgactcacttcacacatccaagtcgcggagcggacccaagagtgaccggcccagaactcagaaaattgcgcgaacatctcggcgaggcgctcggccgcaagctgacggcggcggatatggcgaagctgtgcgggttgccgacggccgacggcgccgaaaagctccgcaaatgggaagtcaccggcccgaccccgaaggtcgcgggcctgctgcgcgtgctggcgatggcgagcgagcactatccgatcctggaggagttcgacgtgttcaatcgccacgacgtaccggtcaaggagcgcgcagcgcgccgcgaagcgttccgcgagcagatgcgcgacgacgtgcgcaagcggctcgactaaagcgggataagttttggttgaatgagcttcgcacggtcttgcttcacctctccccggcggtgagaggtcggattgcgcagcaatccgggtgagggctcttgctctctcgatagaccgcaacccctcacccgatttgctgcgcaaatcgacctctcccaagggagaggtgaactttcgacgccgttccagctcaacccgatctcatcaggccttagccggcgtctcgatcggcaggcggcggcttggttaacgggagagccaagccgcgcacgccgcgttaagccttcggtcatcccgctttaagcgttcgttaggcacaacaaaacgtttcatcgcatcaggtgcgacttaacgctccaagtcgtctttcggtgacagcattttattcaaatgcggtctaacccctcgccgtggatggcgccattcacgctgcgcctcatgacttgtccggagactgccccatgaagaccttcctgctcgcaaccgcagccacggctgctgccctcgctgcctttggcgcgaccgcccaggctgccgacctcggctcccgcggctattaccagaaggcgcccgcgcctgtttacgccgctccgctctacaactggaccggcttctatctcggcggccatctcggcggcgcgttctcgggcaacaactcgttcaacggcctcgcgctgtccaattccgacgcccgcttcatgggcggcgtgcaggccggctacgactggcagctgtcgccgatgtgggtgatcggtctcgaaggccagtattcctggcttggcggccaccagctcaacgcgatcttcccgggcggctacacctacaacaacaaccagcgcggcatcgcctcgatcaccggccgcgtcggctacacctggggcccgggcctgatctatgtgaagggcggctacgcctattccgacaacaacgaatcggtgaggctcggcggcgcgccggtcggcttcgcgctcaccgacaaccacagcaacggctggaccatcggcggcggcgccgaatacatgttcgcgccgaactggtcggccaaggtcgagtaccagtactacgatttcggcgacagccgcttcaccgcgccgggcgcgctggcgcagtacggcagcttccacaatgacgagcacaccgtgaaggcgggcctcaactaccgcttcaacctcggcagcctcggcggtccggcctacggccgttactgagaattacgcgccacaaccaacagtagaaaaggccggcgcaagccggcctttttgcgtccgatcgcgcgcatcgattccgcatggcgaaccatggcagcgcggcaagccccgaaaaatcctgcggattgccgcgattttcccgattttgttaacccaccgcaccgatactcccgcgccggggaaacatccaagagtagtggccacttgtagttggccagggggacacggggcaatggcgtttcggttcaagctcggcaaaccaaatctcaagcgcatccgcctgccgcagatgggcgtcaggggcagcctgttcgcggcattcgccgtgatcgcaggcatggcgctggtgatcagcgcaggcgccggcatcgtgctgcatcggctcggcggcaccatgagcgatctctcaggccgcgacattccgcggctcgccgcaagcctgcagctgtccgcgcagagtgcctcgctcgccgcccaggggcccggcctgctcgcggtgcagagcgacgatgcgctcaacgagcgcaccaggaaggtgcaggaggtcgcgcagcagaccaatgccaagctcggcgagatcatcgagctcggcgccgacaaatccgtcgtcagcgcgctgcaggagaacgtcaagaacaccgacgaggcgaccaagagcctgatctctgcggcgcgcgagcggctcgaggtcggcgcgctgcgcgacaagcagtacaacgcgctgcgcaaggcacaagacgccttcgtctccgccgccggtcccgcgatgctcgatgcgcagacccggctcaacgccatcctcggctcggccgaagtgtcggcggatgacgcgaccgaagcggcccgcaccgtcggccagatcagcaacgtgctcgcggccggcaatctgatggccgccgacatgaccgcagcgctgtcggccaattccagcgagacgctcgatgcgatcgaggcggagttcaagaagggccgcgaacgcatcaagtccaacctcgacgatctgccgaacaatccggcgatcgtcgccgtgcgcgacaccgccgcgaagcttctcgtgctcggcgaaggcaagaccggcgtgttcaaggtgcgccagaaggagctcgactcgatcgattacggtcagaccatcctggaagagacccgcaagctcaatgtcgggctcggcatcagcgtccagcagctggtcgacgccgtgcagaaggacaccgacgcctcgaccttccaggcgcggcagcagatctcgctcgcgaccacggtcatgatcggcctcggcgcgctgaccctggtcggctcgttcctgttcgtctggctctatgtcgggcgcaacatcctgcgccgcatccgcggcctgcagcgctcgatgcagctgttgtccgacggcgacctcgataccgagatcccgcagagtcgccagcgcgacgagatcgccgtgatggccgacgcgctgcaggtgttccgcgagagcatgatcgagagccgcgagctcaccgaaaaccagaacaaggaccgcaccgccaaggcggagcgcgcctcgcgcatggagacgcagatcacgacgttcgaatcgacggtccgcgacgcgctcgaaagcctgcagaccgcggcgaactcgatgcagtccaccgcgcagagcatgtcggcgaccgccgaccagtcgagcgccctggtcaacgcggttgcctcggccgccgaggagacctcggtcaacgtgcagaccgtgtcggccggcaccgaggagctgtcgtcctcgatccaggagatcggccgccaggtcgtcacctcggcggagatcgcccgcaaggcggtggaggaagccagcgccaccgacgccaccatgcagggccttgccgacaacgcggcgcggatcagcgtcgtggtcgacctgatccagaccatcgcctcgcagaccaatctgctggcgctcaacgccaccatcgaggcggcgcgcgccggcgaagccggccgcggctttgccgtggtcgcctccgaggtgaagaacctcgcgagccagaccgcgaaggcgaccgaggagatccgccagcagatcgtcagcatgcaggaggtcaccaccacggcggtctccgcgatccgcaacatctcgagcacgatcggcgagatcaacgacgtcaccaccgcgatcgccgccgccgtcgaggagcagggcgcggcgacccgcgagatcgcccgcaacatccagcacgccgccggcggcaccagcgaggtgtcgagcaacatcgtcggcgtctcgaccgcctcggccgaggccggcgccgccgccggcgaggtgctgaacgcctccgacgcgctgcgccgcgaggccgacgtgctgcgctcggagatcgacggtttcctgtcgaatattcgcgccgcctagcagggctgcgtgcgatccgcagcccggcttgatccgggctgcggaattcccgggaattgcggaccccattctccggacggccatctgattttcggctggcgcggcggcccgggtcccgctaagccggtaccatggacaagaagaccgacagcctgccctcctcggcggaggcattgcgatacccctgggagaatcatcccggccacgaccaggtcgtggaggtggctccaggcgtattgtgggcgcggctgaagctgccgttccgccttaaccatgtgaacatctatctgctcgccgacggcgacggctggaccatggtggatgccggcttcggcaacgaggaatcgatcgcggcgtggaccacgctgttcgagggaccgctgaagcacgtcaaggtcacaaggttgatcgtgacacattcgcatcccgatcatgtcggtctcgccggctggatcaccgagcgcttcgactgcccgctgttcatgtcgcaggtggaatatctgcaatcggtctatcaccagaaccgcggcaccgaggaacggcgcaacgcgcagcggctgttcttccgccgtcacggcatggacgaggatctgaccgagaagctgctcggccgcggccaggattacctgaagcgggtgtcggtgctgccgccgtcctatcaccgcctcacccatggcgacgaggtcgtgatcggcacacggcgcttcaaggtgatcaccggcggcggccacgcgctcgaccaggtgatgctgtattgcgcggccgacaagctgttcctctccgccgaccaggtgctgagcaagatctcgcccaatgtcagcgtctgggcggtcgaacccgagcagaactcgctcggcgaatatctggcctcgctggcgagcctgaccaccactctgccctacgacgtgctggtgctgcccggccatggcgtgccgttctacgggctgaagacccggatcaagcagctcgccgatcaccatgaggagcgctgccggctgatcgccgaggcctgccgcgaggtgccccagacctccaagcagctggtgccggtggtgttccacaagcacgtgctggacgagcaccagatgggatttgccgccggcgaactggtcgcccatgtcaattacatgctggtcgagggccgcctgaccgcccagatgcacgacgacggcatgctgcgctttaagacgacctgaatcggcggcaggggcgcctgccgtgcgatttgagcaaaatcaaaccaaatagagccagatagggcaatttgcccaactgcgacgcatgcccagatgtgggccaatgcatggacattagagctggaaaagctctaagaagaagcagtcattccggtcaggttccgctttctgggttcgccgatggattacagccagttcttcaattccgccctcaaccgcctgcatgacgagcggcgctaccgggtgttcgccgacctcgagcggatcgcgggacgcttcccgcacgcgacctggcattcgccgaagggcagccgcaacgtcgtgatctggtgctccaacgactatctcggcatgggccagcaccccaaggtggtcggcgccatggtcgagaccgcgacccgggtcggcaccggcgccggcggcacccgcaacatcgcgggcacccaccatccgctggtcgcgctcgaggccgagctcgccgacctgcacggcaagcaagcctcgctgctgttcacctcgggctatgtctcgaaccagaccggcatctcgacgctcgccaagctgatcccgaactgcctgatcctgtcggacgcgctgaaccacaattcgatgatcgaaggcgtgcgccaggccggctgcgagcgccagatcttccgccacaacgacacagcccatctcgaagagctgctgatcgccgccggtcccgaccggccgaagctgatcgtctgcgagagcctgtattcgatggacggcgacgtcgcgccgctcggcaggatctgcgatctcgccgagagatacggcgccatgacctatgtcgacgaggtgcatgcggtcggcatgtacggcccgcgcggcggcggcattgccgagcgcgacggcgtgatgcaccgggtcgatatcgtcgagggcacgctcgccaaggcgttcggctgcctcggcggctacatcgccggcaaggccgaggtcatcgatgccgtgcgttcctacgcgccgggcttcatcttcacgaccgcgctgccgccggcgatctgctcggccgcgacggccgcgatccgccacctcaagacctcgaactgggagcgcgagcgccaccaggaccgcgccgcgcgcaccaaggcgatcctgaccgccgccggcctgcctgtcatgtcgagcgacacccatatcgtgccgctgttcgtcggcgaccccgagaaatgcaagcgggcctcggacatgctgctcgaggaccacggcatctacatccagccgatcaactatccgacggtcgccaagggcaccgagcggctgcgcatcacgccctcgccctaccatgacgacgggctggtcgatgcgctggccgaggccctgctccaggtctgggaccggctcggcctgccgctgcaccagaagtcgctggccgccgagtaaccctatccgttacgggtcccgaatttgggccggccgtgcatcgcgcggccggcccaatgcgttataatcctgacacccggccgctttgtttgagcatgatcttttcggaaagccgcttcacacctttccggatcatgccctagaggccgggacaggagataggcagcgatgctgcacgactggggcgtcatcgccacggcgttcgcctacatcggattgttgttcttcattgccagccgcggcgaccggatgtcggcgggcgcgcgcggccgcgccagccagtggatctatccgctgtcgctggcgatctactgcacctcctggaccttcttcggctcggtcggcttcgccacccgcaccagcatcgacttcctggcgatctatgtcggcccgatcgtgatgatcggattgtgcacgccgctgctgcgccgcgtcatcgcgctcgccaagtcgcagaacatcacctcgatcgccgatttcatcgccgcgcgctacggcaagagccagaaggtcgccgccaccgtggcgctgatcgcgatcatcggctcggtgccctatatcgcgctgcagctcaaggcgatggcctcgtcgctggagaccatcctgagcgaggaccaggcattttcgaagatccccgtgctcggcgacatcgcgctgatggtgacgctggcgatggcggtgttcgcggtgctgttcggcacccgccacaccaacgcgaccgagcaccagcacgggctgatcctggcgatcgccgccgaatccatcgtcaagctggtcgccttcatcgccgccggcgccttcgtcaccttctggatgttctccccggtcgagctctacgagcgcgcgctgaagacgccggaggcggtgcgcgcgatcgaatatgtaccgtcgatcggcaacttcctgatcatgacgctgctgtcgttctgcgcggtgatgctgctgccgcgccagttccatgtcagcgtggtcgagaattcgaccgccgcggaagtcacgagggcgcgctggctgttcccgctctacctcgtcgccatcaacgtgttcgtgatcccgatcgcgatcgccggcctcgtcatcttcccgttcggcgccgtcgatgccgacatgttcgtgctggcgctgccgatcgagggcaatgcgcaattgctgagccttgcggtgttcgtcggcgggctgtcggcggcgaccgcgatggtgatcgtcgaatgcgtcgcgctgtcgatcatggtctccaacgacatcgtgctgccgctggtgctgccgcgcagcgacgacgcccgcatcggccagaaggatttcggcgatttcctgctgaaggcgcgccgcttctcgatcttcgccatcatggtgatggcgtatttctactatcgcgcgctcggcaacacccagctggtcgcgatcggcctgttgtcctttgccgcgatcacccagctcgcgccggccttcttcggcggcctgttctggcgcagggccaccgcgcgcggcgccatggcgggcatgctggtcggcttcgcggtgtggctctacacgctgttcatcccgagcttcctggagaactcgactgccgggttgatgctgctgcaacacgggccgttcgggatcgaggcgctgcggccgcaggcgctgttcagcgccgatctgccgccactgctgcacggcgtgctgtggagccttgccctcaacatcctgacctacgtcgtgttctcgctggcgcgcgcgccgtccgcgatcgagctgttgcaggccgacctgttcgtgcccaacgcgctggctccgatcgcgccgagcttccggcgctggcgcaccacggtgacggtgcaggacatccagagcacggtgacgcaatatctcggccccgaccgcacccgcgaggccttcgccgcattcgccgccgaccgcaacatcgtgctgcaaaccgcagcgccggccgatttcgagttgctgcagcacgccgagcggctgatcgcctcctcgatcggggcggcgtcctcgcgcctcgtgatgtcgctgctgctgcagcggcgcacggtgtcggccaaggccgcgctgaagctgctcgacgactcccacgccgcgctgcatttcaaccgcgagatcctgcagaccgcgctcaatcacgtgcgccagggcatcgcggtgttcgacgccgatctgcagctgatctgctccaaccgccagttctccgaactgctcgctttgccgccgcatctggtgcagctcggcattcccttgcgcgagatcctcgaattcatgggcgcgatcaatccgccgccggccggtgacggcaacaacctgctgcaattgcggctgcgtgcctacaccaccgagggcgagccctatctggaacgcttcgccgaccgccacctcgtgatcgaggtccgcgccaaccggatgccgggcggcggactcgtcatcaccttctccgacgtcaccccgagcttcgaggccgcggaggcgctggagcgcgccaacgcgacgctggaaaagcgggtgcgcgaccgcaccgaggaattgacccggctgaactcggagctcgcgctcgccaagggaatcgcggaggacgccaacgcctccaagacgcgcttcctggctgccgccagccacgacatcctgcagccgctcaacgcggcgcggctctatgtcacgagcctggtcgagcgccagaacggcggcgaggattcgcggctggtcgagaatatcgacgactcgctcgaagcgatcgaggacatcctcggcgcgctgctcgatatttcgaggctcgatgccggcgccatgacaccggcgatcaccagcttccggatggccgacctgatgcgctcgctggagatcgagttcatgccgatcgcccgcgacaagggcctcgatctgcgcttcgtggcctgctcgctgccggtcgaatccgaccgctcgctgctgcgccggctgctgcagaacttcatctccaacgccatcaaatacaccccgcgcggccgcgtgctgatcggctgccgccgccgcggcgacgcgctcgagatcagcatcttcgacaccggcgtcggcatccccgtgcagaagcgcggcgagatcttcaaggaattccaccgcctcgagcagggcgcccggatcgcccgcggcctcggcctgggactatcgatcgtcgagcggctggcgcgggtgctcaaccaccgcatcgcgatctccgccaatgtcagcggcggctcggcgttctcggtgacggtcccggtcgcgaccgccgtcaaccacaccgcggccgtcaccagcgccacgccactgtcgaagacgccgatgagcggctcattgatcgtctgcatcgagaacgatcccgccattctcgacggcatgaagacgctgctgacggcgtgggatgccgaggtgatcgcggtgctcgacgccgacggcgcgatcagcgcgatcgaggccgctggcggccgcgtcaccggcgtgctggtcgactaccacctcgaccgcggcaacggcgtcgccgcgatccgcgagatccgccgccgcttcggcgacaacattccggcgatcctgatcaccgccgaccgcagccccgccgtgcgcgccgccgcgcgcgaggaaaacatcgcggtgctgaacaagccggtcaaaccggcgtcgctgcgcgccttgctcgggcagtggcggacgcagcagatggtggcggcggagtagctgctcaacacattcaccgtcattccggggcgcgccaaaggcgcgagcccggaatgacggcggtggttggatgctacgtcgacggcgtgccctggcgccactggccaccggcgatcttggcggcggcgatcacagcctgggtccggctttcgacgccgagtttctggaggatggccgagacatgggccttgatggtcgcttcggagacgccgagctcataggcgatctgcttgttcagcagcccctcggacagcatcatcagcacccgcacctgctgcggggtgagtgtcaccaggcggtcgcgcagccgggtcatgtcgggatcgccggcggccgacaggtcggtgtccggcggaacccagacatcgccttccattaccttcatgatggcatcgcgcagcgtctcgacgccgaaccgcttggggatgaaccccgaggcgccgaagtcgagcgagcggcggatggttccggcatcgtcgctggcggacacgatgaccaccgggatcgccggatattgcgcccgcagatagatcagcccggaaaagccgctgatccccggcatcgacaggtcgagcaggatcaggtcgacctcggagtcccgttccagcagtccggtcaggtcctcgaacgatccggcctcgctgatcgtggccgaactcacgacgctcgacaccgcctggcgcaacgcatcgcggaacagcggatggtcgtcggcgatgacaaggtgagtattggcagcagcaatcatctcagtcccacaagcgggctttggcagccccgcgccgttcggttgtcgcccgcgcggcagtatcacgcaagcgctcgaaaatgccagatgccaacgcagttaacccgcctagcttgtgcgccgcaatagacgcacgcggggacgttccatccagcactcgcccccaaagataagttcaagcgtgcaaaagccaaaagtcttattggggcgggtttcactgcgatgttaccctcaaatcaagccttaggctcattcgggcctaacccgccagccgggggcgagcatcagcaataattcggggggagctatccagatgtccacaatgactgcaacctcggcgcggcccgccggcatgaccaaggatgagcgtttcgtcatcctcgcgtcgtcgctcggcaccgtgttcgagtggtacgacttctatctctacggctcgctggccggcatcatcggcacgcagttcttcacgatcgccggcgccgacggcaagccgatgttcgaccaggccacgcgtgacatcttcgcgctgctggcctttgcggcaggcttcctggtgcgcccgttcggcgccatcgtgttcggccgcatcggcgacatcgtcggccgcaaatacaccttcctcgtcaccatcctgatcatgggcctgtcgaccttcatcgtcggcttgttgcccggggcggcccagatcggcatcgcagcaccgatcatcctgattgcgttgcgcctgctccagggtctcgcgctcggcggcgagtatggtggcgcggcgacctacgttgccgagcatgcgcctccgggcaagcgcggctactacacctccttcatccagaccacggcaacactcggcctgttcctgtcgctattggtgatcctgttcacccgcaccgcgaccggcgagcccggcttcgccggcgcaccgggcgcctattggggcggctggcgcgttccgttcctggtgtcggtgctgctgctcggcatctcggtctggatccggctgcggctgaatgaatcgccggtgttccagcgcatgaaggaggaaggcaagacctccaaggcgccgctgaccgaagccttcgggacctggagcaacgccaagatcgtgatcctcgccctgctcggcctgaccatgggccaggcggtgatctggtacacggggcagttctacgcgctgttcttcctgcaatcgatcctcaaggtcgacggctacaccgccaacctcctgatcgcctgggcgctgctgctcggcaccggcttcttcctggtgttcggcgcgctgtcggaccgcatcggccgcaagccgatcatcctggcgggctgcctgatcggcgcactcactctgttcccgatcttcaagatgatcacgaccaacgccaacccggcgctggagaaggcctacgagacggtcaaggtgcaggtggtggcggatcccgccggctgcggcgatctgttcaacccggtcggtacccgcgtcttcaccgcgccttgcgacaccgcccgcgccttccttgcccagtcgtcggtgaaatacgcgacggtaccgggcccggccggctcgccggtgaaggtcacggtcaacgacaaggacgtgccgtacacggacgccaagacgtcgaaccccgcgatcacggcggcggtgctggcggcgggctatccgaagccgggtgatgccggcatcgtcaagatgtcgaacccgttcgacgtcttccgtccgcaggtggctgcggtcatcggactgctgttcatcctggtgctctacgtcaccatggtctacggcccgatcgccgccatgctggtcgaactgttcccgacccgcatccgctacacctcgatgtcgctgccctatcatatcggcaacggctggttcggcggcctgctcccggcgaccgcgttcgcgatcaccgcctcgaccggcgatatctactccggtctctggtatccagtcatcttcgcggcaatcaccgtcgtggtcggcgcgctgttcattccggaaaccaaggacgtcgacatcaccaagacctgaccggtcgacggctcactcaaaatgcatcggccgcggagcgatccgcggccgatgtcgttttgtttggccattcgggcgcttcagcgcacggcgccgatgaattgcagcacgacctcgcgccgatgcgccttagcgcgatgctcgatcagatagatgccctgccaggtgccaagcgccatctcgccgtcgagcaccgggacctgcagcgaggtcgccgtcagcatggtcttgatatgcgccggcatgtcatcggaaccttcggtgtcgtgacgccagccgccgtgttccggcgctgcgcggtcgagcgccgtcatcaggtcggccaacacggtcggatcggcattctcctggatcgtcagcgaagccgaggtgtgacggatgaacagcgtcaccgcgccctcgccggcgcgcacctcacgcaggaactttgcgacctcgcgcgtgacgtcggtgaagccggcgcccggcgtttccaccgtcaagcgcgaggaggcgatgctggttgccgcgacggaggatggcgctgagcgggacattgttcttggtgaggtcatcagtaactttcactatgtcgtcccggcgaaggccgggacccatactccgcggcccctcggtcacgaagatttggagttgccagcttgtccacccaactccgagcggtggttatgggtcccggccttcgccgggacgacgcagcggacagagccgcctcaaatcttgccgccgttgacgtcacgctggacgcggttcgccatctcgatcagccgccgccaggcccgctcgacgaacgacatcatgcgatccatgtcgcggtcgctcggcagcggaatctcgatcttgcgctcgccctcggcggtcttcgcatccggcttcttcaacgaatccgatttcggcaacgcctcgtcagtcttcgccgacggtgcgcgcgcggcgagttcgcctttcagtttgtcattgtcggcctgcaggcgcccgatctcggcatcgagcgccgcgcgctcgtccggcactatgtagcaggcccagccggcgctggagttggtgcaggtcgacaccgcaccgctgcgggtgtcgagccgcaggaagccgtcgccggccggcgacaatgcatagcgaccattctcggtgtcgggcgcggtttccgcgatcgccgcgccgctcgagatcagaacggcgacaattgcaatcgacaatttcgggcacgacatcgcgatgggcatggcttgctccgcctcagtctgattcctgcccctcacccacagagctatagggcttgcggcctgacttcaacgcgtcgtcgagcaattcgatccggtcctgcccccagaagacctcgccgtcgagcacatatccgggcgagccgaacacgccggcatccaacgcattctggcggttctgctcgtaggccgcgctgatcgcatcagaacccgagcgctccaccagttgccggcccggcaaacccgcatcgtcggcgagcttcaccagcgtcgcgggatcggcaaggttgagctctagctcccagaccgcggggtaggcgcgttgcaggaacggctcgggatcgagacccgcctcgagcactgcgatcacgacgccatcggcgaggcgtgcgttgaacggccagttggccggctgcaggtgaaaattcagcccgcgcttgtcgcgccagcgctgcaactcgatcaaccgatagcgctgccgcaccggatggcgcttggcgagcggcagcccgccggtctccgagaacagatcgacgagcagcacgggccggtaatttaccttgagatcgtaagtgcttacgagccgaacgaagggcgtgtggccgatataggcccagggtgattgcagcgagaagtagtagtcgatctggcgcggcatgcggaaccttgactgcacgaggggatgaagactttcggcgatcccagcagagcggggaaagccgcgcaacatcgctcaatgtcacgcaagctgttgcactgcgaacactgcgtcactctgaccttgaatatctcaaaataaatcgagcagaatcaaagcaataaccggttacgacgcaatcttgacttgattagacgcggtaagtatggtccgcgcggcttttgacggggacgggcgcaatttccatcatccgcggcatcggttagtgtttgcagcatggctgagaacaccaacgacggcgcaagtggaagtcgcgatcaatcgcctcctgacgaagctgcgctttccgcaaggctcggaagtctcgatcatcggttgtcagaaattcgcgacagccgcaggaacaagactgatcaatccggtactgaaagcggggacagtgccgccagagcttcggcgatggcgctcggttttcgtctttcctcggagctgatcgcgggcgttgccgtcggagcggcgattggctggggggtcgaccattggctgtcgacgtcgccattcggcttcatcgtgttcatgctgctcggcttcgtcgccggcgtgttcaacgtggtgaggtccgcgggcgtggcttcaggcaagcgttgagcgccggcggaagtcacgacatttgaaattcgataaccggcaggatggccggtggaccaagagccgcgcggatgaaaatcgacccgatccatcagttcaatatcgagcccctcttcacgctcggccacatcggcaatcacacgatcgccttcaccaattcgtcgctctacatgttcatcgcggtgctgctgatcgcactgctgatgctggcgagcggccgggagctggtcccgggacggctgcagtcggtcgccgaactctcctacgagttcatcgcctcgacgatccgcggcaacgccggcgcggaaggcatgaagttcttcccgctgatcttctcgctgttcatgttcatctgcgtctcgaacctggtgggcgtcgtcccctacacgttcacgatcgcgacccacctgatcgtgaccgcggcgctggcgcttttggtgttcttcaccgtcctgatctacggcctctacaagaacggcccgaaattcttcaagattttcgtcccctccggcgttccggtctacatcctgccgctggtcatgttcatcgaggtcctgtcgttcttcctgcggccggtctcgcacagcgttcgtctgttcgccaacatgctggccggccacatcgcgctgaaggtgttcgcgggctttgtcgcgatgctcggcttctcgctgggcgcgctcggctgggtcggcggtgtgctgccgctggcgctcacggtcgcgctgtacgccctcgaactgctggtcgcgttcctgcaggcctacgtgttcgcgatcctgacctgcatctacctcaacgacgccattcatccgggacactaagcggtccggggaatctccacccaccaatctgtctatctttctcaaggagctacaaatggaaccggcagcagcaaaacttatcggcgcgggcatcgcgtgcatcggcatgggcggtgcgggcgtcggcgtgggcatcatcttcggcaactacctcgccgctgcggtgcgtaacccctcggccgctcagggccagttcggcaacctgatcttcggcttcgccgtgaccgaagcgctcggcatcttctcgctgctgatcgcgctgctcctgctgttcgttccgctctgagcggcacttccttcgcgccgcccaggatcatcccgaggatcgttccaggggcggcgcgcatgacagcaacaggagaacaccatggctgagagtcatggcgaggcaaaaggccagaaagccggcgcccacaccgaggccgaaggcggacatcacggcggagcctttccgccgttcgattcgtccacctacgcctcgcagctggtgtcgctggcgattgcatttgtcgcgctctacctgatcgtgtcgcgtatcgcactgccgcgtgtcggcgggacgatcgatgcacgtcagaacaagatcgagggcgatctggccgaggcgcagaagctgaaggacgagtccgacgcggcgctgaaggcctatgaaaccgagctggcgaatgcgcgcgccaacgcgcaggcgatcggcaacgagacccgcgagaagctgaacgcggcctcggaagccgagcgcaaggcgctggaagagaaactgacggccaagctcgccgacgccgagaagcagatcgcaacgacccggaccaacgccatgagcaacgtccgcggcatcgcggcggatgcggccggcgccatcgtccagcaactcgccggcgtcacgccggacgccaatgcggtcaacagcgccgtcgacgcgtcgctgaagggatagacgatgttttacgaaccggaaacctgggttgcgatcgccttcgtcattctgctggtcgtcttcggctatctcggtgtccatcgcaccctgctgacggcgctcgaccaccgtgccgagcgcatcaaggccgagctggaggacgcccgccgtctgaaggacgaggccaacaagctgctcggcgagtacaaggcgcgccgcgccagcgccgagcgcgaggcccaggacatcatctccagcgccaaggccgaagccgagcggatcgcggctgaagccaagaccaagatggaagattttgtcgcaaggcggaccaagaccgccgagagcaagatcgcccaggccgaggcccaggccgtggccgatgtccgcgccgccgcggccaacgccgcggtgaccgccgcctcgaccatcctgtcgcagtcggtcaagggctcggttgccgacgacctcgtcggcaagggcatcgccgaagtccgttccaagctgaactgacgcgatcccaactcgatctaaaagaggccggtgcgagctgatcgcgccggcctttttgttttacttcttgttttacttcttcttgcgcggagcgcgcggcttcggttccggcttcagggcctgcgggtcgaagccgatatagaagatgtaattgtcgttgtcggccggcgacggcgccggatagacgacatcctcggcgaccaggctgaacggcacgctgccgctgtcgtccatctgcaccgtggtcgtgtaggccttggtcgcgatggtcttctcgccgacgccgcccagcaccacggcgacgcgcagcggcacctggatgctcggcggggcgccctgcggcccgacgatgatccgtccctgaataccgatcttggcggtgatcacgccgccattgaggctgcattgccgtgcggtgcgcgtgatcgaggccaggaacttgacgtcgttgccgaccgcctccttgccgtccgccgccaccgaataggtcgaggccccggagcggatctgcaccggcgggcaggtcagctcggcatcggcgtcgttcagttgctgcggcgccgccggcgtcgccggcttcgaatccgacgacccgccgccgaacaggctcttgaagcggtcgctcaacgactgcgccgagctggcctccggcagcagggtggcaccgagaccgatcgataccgccgccgcgagcgcgaacctgatcaccctgtcacccatcaatatcctcaaatctccaaaccggttccccgttcgcggggcgttatagcaagccaatggcggcgaacccaaggcctgtgaaaggcatgtgaagggcatgtaacacggcatccggaacgcgccgggcggctgcggccatccgccggcaggcccgcggttcagccgcggaaatcctcgtgcagcaggccgaacagcagatggtcctgccagatcccgttgatgcagagatagcgccgcgccaggccctcgcgggtgaagccgcacttctccagcacgcggatcgacgacgcgttggaaggaatgcaggccgcctcgatgcgatgcaggttgagctcgccgaacagcgaaggcagcagcacccgcaacgccgtcgtcatgtagccgcgatgggcatgcggcaggccgacccaatagccgatcgtgccggcctgcacgatgccgcggcggacattggcgagcgtgatcccgccgatcatcaccccatccgattcgcggaagatgatgaacggataggagcgatccgcggcgatatcctcggagtagcggcgcagcctgcggcggaagccggcgcgggtcaggtcgtcggagggccagatcggctcccacggcgtcaggtaggcgcggctgaactcgcgcaactgcgcccattgcgggaaatccgacatttgcggcgcacgcagcaaaagcccgtgaccgcgcggcatcagtgcagcgggtccaccggacggcaaacgaaacagggccatggcccaacactcccccgacttctccctcgccccgcgcttgcggggagagggtcggggtgaggggtcgttccgcagactcgatgtgcggatggacccctcacccgaagccttcggcttcgacctctccccgcaagcgcggggcgaggtgaaacctcaaatcaatgcagcagcgtctttgccttcgacttcgtcaatccttccgcaaaagacaccgccgtgtccagacccctgccgctgccgagggcgacaacggcaggccggctgcgcgacagcagcgcgcgggcggcattgcggctcgattcgacgctgaccgcatcgatccgcgccaccagttcttccaccgtctgcggccggccataggccagcacatggcgtgccagctgttcggcccgggatgaacagctttccagcgccatcagcaacccggccttcatctgcgccttggcgcgggcgacctcggcctccgtcagggtctcgacggcgtcattgatgacgtcgacgatgacctccatcatttccggcgcgtcggcggggtcggtcccggtgtagaggccgaagaagccggtgtcggtgtagggggcgtggaaagtgtagatcgaatagcacagcccgcgcttctcgcgcacctcctggaacagccgcgacgacatcccgccgccgagcgtgttggtgaagacctgcagcgagaacagcgacaggtcggtctgcggcacgccttcgagcgccagcgtcagatgcgcctgctcgagatcgcgatgcaccaccttcgagccgcccttgccgaacatcgccggctgcggcttcggcgccggcgtggcgtcgaagctggaaaatttctgcgcgacgtcctcgacgacgcgcttgtgatcgaccgcgccggcggcggcgaccaccatgtcgggggcgcggtaatgggtcgacagatagccgcgcagcgtgtcgcggttgaaggccttcagcgtcttggcggtgccgagcagcgatcgccccatcggctggtccgggtagcagagctcgttgagatgctcgaacacgacgtcgtcgggcgtatcctgcgccgcgccgatctcctgcacgatgacgctcttctcgcgctccagctcatccggcacgaaggacggattggcgaggatatcggagagcacgtcgagcgccagcggcacgtcggccttcatcacccgcgcataataggccgtggtctcggtcgaggtgccggcattgaggtcgccgccgaccgcctcgatctcctcgacgatctcgcgcgaggagcgccgcgcggtgcccttgaacgccatgtgctccaggagatgcgagatgccgtgctcgttcggtttctcgtcgcgcccgccgacgccggcccagaccccaagcgccgcggtctccagatgcggcatggtgtcggtgacgacggtcaggccgctcggcagcttggtgatttcaacgctcatcaggcaactccctgcttggcggcacggctgaccgacagcacgaagcgctcgacctcggcggaatcattcttcatgaccgtcatctgttctgatttcgtcatcaaccctccgagccaggccggcagttgcggacgcaccccgcaggcggcctcgaccgcatcggggaacttggccgcatgcgcggtcgacagcacgatgttcggaaccctcgagtcggaggtgtcgcgatcggccaccgcgagcgccactgcggtgtgcggatcgaccaggtcgcccgcctcgcgccaggcggcacggatcgccgccgccgtctcggtctcgtcggcgcggccggcgtcgaaatcgcggcgcaccgcggccagcgtcgcatcagggagcacgaagcggccggactgcttcagcgaagccatcaggcggcggacctggtcggcgtcgcggccagacgcctcgaacaagagccgctcgaaattcgacgacacctggatgtccatcgacggcgatgccgtggcgtgaacctcgcgcacctcgtaattgccggtcttcagcgtgcgcggcaggatgtcgttgacgttggccgcgatgcgcagccagcggatcggcagccccatgcgcttcgccacatagccggcgaagatgtcgccgaaattgccggtcggcaccgtgaagtcgacggtgcgcgcgggcgaaccgagcgccaccgccgaggtgaaataatacaccacctgcgccacgatgcgcgcccagttgatcgagttgacgccggacagcgccaccgcgtcgcggaagcgatggttgttgaacatctccttcaccagcgcctggcaatcgtcgaatgtgccttcgatcgccagcgcatggacgttggcagcgccggtcgtcgtcatcatgcggcgctgcacctcggagatgcgcccgttcgggaacagcaccacgaggtcgacattgtcgagattggcaaaagcttcgaccgcggcgccgccggtatcgcccgaggttgcgaccacgatggtggtgcgctgcgcccgcttggccagcacatgatccatcagccgcgagatcagctgcatcgcgacgtccttgaacgctagggtcggcccgtggaacagctcgagcaggaactggttcggcccgacctggtcgagcggcaccaccgcaggatgccggaacgtggcataggcttcgttggccatacggccgagctcggcatcggaaatctcgccggcggcaaacggcctgatgatctcgaccgcgacctcccaatagggacggccgaacaagccggcgatggtctcatgcgacagctgcggccaggtctcgggcacgtagagcccgccgtcgcgggcgagcccggtcagcatcacatcgcagaagccaagcaccggggcctcacccctggtcgaaatatatcgcgtcaaaccgccctccaaaggcttcgctccgagccttaagcctttgatatcatggatttatcgagttcgccgcatgcgacccgaacggctcaccatagaagatcggactggcaatgggtagcccgaagcgcgcgcattgggggcggcgcggagtcgtgcggcgcgttgccttcgcctgatcatcaatagcgccgcattcaccgatgtcgtcctggcgaaagccaggaccccataaccaccgcagttggtgatgaacgggatggcggccccagcgccgcgcaacaattgagattcggggtaatgggtcctggctttcgccaggacgacactgagtttgcagcatttcttcgtcattccgaggtggcgcgaagcgccgagcccggaatccattggaccgcagaacaagcagtggaatggattccgggctctcgcttcgcgagccccggaatgacggcggagagaggtcggcgatatgctccctaccccttcggcggcgccagcggctgcacgatctcctggaacggcggcagcgcctcgcagcgcgcggcgtgcgcctgcagcgccggatagcgcgcgtcgaacagatgcggatgcgcctcgcgggtgaagcgcagcgcgcaggccacggcgatgtcggcgtgaccgatacgatcgccgagccaatatggcgtcggcaccgccgcgcgctcctgatccagcaccgcgagcacgcgggagatctgtccctcgcagcgctcgacccagagcttgagctgctccttgcgcagcacgcgctcgtagaccaggctcaccgccttgtcggcgagcccggtcgccagcgccatgatgcgcagatgccggcgccgctcgatgcctgagcgtgcaatcatcgccttgtccggcccgaccaactcgtcgagataatccaggatcgcgctgctctcgatcagcgcctcgccgtcgtccagcaccagcgtcggcacccgctgcaccggattataggccgcaacctgctccgcatcgccgaaggtcgaccacggcttgtgctcgaacggcaatccataaagccgcagcgcgatcgcggtgcggcggacgaagggcgagtcgtactggccgatcaggaacatctgtcatctcgaaggtcatgccgcagcggaccgcggccgcgaaagcagggctttcgaggtgtggcggtcgagccgaggtcagaggttgcgctttgcaccatcctagatggaccgcgctgcattgcaaccggatcatgatccgatctgtgtgacgagctatgcaatcaccggcacatgcctcgccgcatcgcgcggcagtttgccattgagcctcggatcatccgccacctcgatctgccgcttgaacgcgcggaagccggagcgctggtagaacgcgaccgctgagggatgatcgaaggtgcaggtgtgcacccagacgcggccgacatcgcgcgaccaggcgatctccagcgcgcggttcatcaggaagcgcgcggcgccggtgccgatgaattttgcggtgacgccgaaatagagcagctggcattcgccgtccacgctgaagtcgagctcaagcaggccttcatcctggctatcgacgaccagcccgtagagctcgaccccgggcgcgtgaatgcgcccggcgagatcggcgtcatcgagcccgctgcgggtaaaccacagccattcctcgccgacgcggcggtagagatcgcgataccagtcgagcgcgggcggctcgaccttgcgtaggcgccacgcgccgggcggatcatcgcgcatcggcgggcgcgcagtcatttccagatgcgtgacgacggcggcgaccttgccgtggggaatgtcggagtaaccgtcgggcagcagcattaggcgaccttatttctgcgtatcggccggagatattcgcatgtcgcggcacatgcaatgcgacgtgcgatgcaggagctgcaggaagaactggcgaaatagagcgcgcgatacgagccacatatgtcgtcccggcgaaggccgggacccattgccacaaagtggagttgttaaggcacgctgtggccccagcgcgcgaaacaatttggcattcgtggttatgggtcccggccttcgccgggacgactgcggagtttgtggcgcggtcagtgagagtacgctccccctcacctcggcgtcagcgagatcgcctcggcggctgcggcttccaccgcgccgcggctgtagagcagcgggacatactgccccgtcgcccagagcggggcgaggtcgcggtagtggccgctgaagggatcgccggattggcctggcgtgttgatggtgcggctcgcatcccaattgccgacatcgagcaccatgcggaacgaggcgcccgcggtgagatgatagtcggtgcggcgataagtggcggcgcgcggcacattggcggcgccgccgaaggcgagcgggccgacctgcatctgcgccgcggttgccttgtcggcgagcggcatcagcgcgtggtcgaacttggcgacgtgcaaccggccccagcgccacatggacgcatcgctcccgagcttgtcggtgacatcggcgacggccgcgccgaggctgtcgcgcagcacgcggtcgcgctccgctgccggatcgttgccgagcgcagcgtcgggcttttcgagatagccgatgatggcggaaatgctggaagcctccggcgcgatcagctcggccgctttcggcgccgtggtcttaagcagcaccgggccgaggtggtttgcgatccacacttcatagacagcagccgcggcgctgtcctcggcgtcgcgcgcatcccaggccttgagcaggtcgagacccttcttgacgttggcatcgtccgacgtgagcggcctcaaaagcgcgacgaggcgccgcgcgagcataccggtgtcgtcgttctgcaacgccatcgcatctgccagcgtcaccttgctgttggcctgcagcacctcggtgatgcgctgccagcgcgcgctgtcggaccactcgaagccgacccggcgctcgttcaccggataatccgccggcaggttcatctggttggcggtggcaataaagccctgcttcggctggtacagcttcggcaattcatcgagcgacaggaaaccctgccactcgtaacgaccgtcgcccggcaccggcatcaggccgtcgaagctggtgcggcgcggcgtcttgccggccgcgacccagccgatattgcctgacgtgtcggcgtagacctggttctccgacggcgcgccccagcgccgcatcgcgccgaggaagctggtccacgacttcgcggtcatgtagtcggacgagccgaaataggccgaggtgcctggctcgaaccagatcgagcgcaccgcgaacgcgtgcttgttgtcggcgtcgacgaagatcaccgggccgtggcgggtgaacttcagctcgaggtcgcggtcggcctcgcccttcaccgcttccttctcatgcacgaccttcatgtcctcccagcccgtgccgtagcggtactggttcggattgtcagggttgagctcgtagacgtagaggtcttcctggtcgacgttgaagatggtgagaccgaacgcgatggtatcgttgtggccgatcgagatgcccggcaaagccggctcgccggcgccgatcaccgagatgccgggcgcgttgaggccgacgatgtagcgcagcgacggcaccgaatgctcgcgatgcggatcgttggcgaggatcggacgtccggtcgcggtgcgcgacgccgcgatcacccagttgttggagccgatggtgtcgcgctgctggtcggcctcggccaaaaaccggtcgggatcatgcgccagcgccgccttctggtccttcggcgcggcgaacttcaccgggcgcgtggcgaggtcgtaggcctcgagcacgcctttcggcacgctgcagggatcgagcccctcgggaatcttcgtggtccagtccggctccagcttgacgcggaagcgatcggcatcgagtcctgcggcgcaggcgaccagtgcgcgcttcacctcggaggcgacgttgcgcgttagtccgtggctacgcacgcgcacgacatcctccgctgaccacaggtccggcttcgtcccggcgatccgaaactcgatcggcagcggacgcttgcccgcgttgacgtcggcaacataggcgttgacgccggcgacgaacgcctcggcataggttttcgccttcgggccataggcggcccattccgcattcatgtcgccgcgatagaggaacaggcgcagcgccttgtcctgctcggcataagcggggccgaagtctttcgccagcaggccgagcccgcgcttgcgccagagatcgatctgccagagccggtcgcgcgcggcgttgaagccctgcaggaagaacaggtcgtgctcgttgccggcatagatgtgcgggataccccagacgtcgaccaggatctggcccggcgccttcaacccggcgacgtcggttttcacctcgcgcgccgacacaagcgcgctcggcttctcgcgcgcggtggcgggagctgcgagcatcgcggtgcagagcgcggcagcgagcagtctggtgacgcggttgagatccgtgttcatgttgttctccaatggttgttattggttggaagtctgcatccgcggtgatggcgtgccccctctcccgcttgcgggggagggctggggtgggggtttcgccgcgatgggactagtcgctatgcggagagagcccccacccgccgcgctacgcgcgtcgacctcccccgcaagcgggagaggtgaagaaactctgccgcacgagttcaactactccccctcgtcgctcgccagcacgcccttcacggcgcgcgcccagccggcgagcttgcgctcgcgggtcgcctcgctcatcgccggcctgaagcggtgctcgagccgccaattgtcggcgaacttcgccggctccgggtagacgccggcctcgaggccggcgagataggccgcgcccagcgccgtggtctcctggatcatcgggcggtcgaccggcgcgttgagcaggtcggcgagccgttgcatggtccaatcggatgcggtcatgccgccgtcgacgcgcagcacggtgttggcggcgttggcctcgggccagtcggtgcgcatcgcagcccacagatcgaaggtctggtagcagacgctctcaagggtcgcatgcgcgagctcggccgggccggtgttgcgggtcagcccgaacagcgcgccgcgtacgcgcggattccagtatggcgcgcccatgccgacgaaggccggcaccagatagacgctctgcatcgagtcggatttgtcggcaagcgggccggtctcggcggcgtgcttgatgatgccgagcccgtcgcgcagccactgcaccgcggagccggcgacgaagatcgagccttcgagcgcgtaggtgcgctggccgccgagctgataggcaatcgtcgtcagcagcttgttcttcgaggccaccggcgtggtgccggtgttgagcaaggcaaaacagccggtgccgtaggtcgacttcatcatgccgggctcgaagcaggcctggccgatggtcgcggcctgctggtcgccggcaatcccggagatcgcgatcgggccgccgaacagatccgccgtgctctcgccgaaccgggcggaggaatccttcacctccgggagcatcgagcgcggcacgcgcaggaggttgatgaggtcgtcatcccacacgccggtgtggatgttgaacagcagcgtgcgcgaggcgttggtggcgtctgtcgcgtgcacccggccgccggtgagccgccatagcaggtaacaatcgatggtgccgaacaacagctcgccgcgttcggcgcgctcgcgcgcacccggcacgtgatcgagaatccaggcgactttcgtccccgagaaatagggatcgataatgagaccggtcttggccgagatcacaggctcatggccctcggccttgagtcttgcgcagatgtcggcggtgcggcggtcctgccagacgatggcgcggtgcacggcctgccccgtggcgcggtcccacaccacggtggtctcgcgctggttggtgatgccgatcgcggcgatgtccttggccttcaggccggccttttccagcgcctcgcggcacaccatcacggtcgaggtccagatgtcgtccggctcgtgctcgacccagccggaagccgggaaatgctgcggaaactcctgctgcgcgaccgcggcaatggagatgtcgccgcgaaacaccatggcgcgcgacgatgtggtgccctgatcgatggccagcacgaaagacatgagcgtttcccttgaggcttggtagcaggcgccaagggagcggattaccgcggcgaggtcaagctttgggaaggtggtggtgagagacccacggtcctaaggcgcgagtggcgccacacgctccgctgtcgtcccggcctagtgcgcaattgcgcacgggggccgggacccatactccgcggcggttgttgtaggcgggactcgtcatcccatgagcgtgcgacaatgaccctcggtggttatgggtcccggccttcgccgggacgacactgaacgcttggtaccgccggtgattcatgcacctacattctgtgatccgcgccagcgggtccgcgcgaagcgcggccgatcacatcggccggtacgtccgcacgtcggccggcacgttgacgccgatcttgatcgcgccgaccgagcggatgatgtcgtcgccgagcagttgggcgaagcaggcatagccccaatcgttcatgtgcaggccgtcgtcgatgacgaaatcgttgatcgggatcgcctgccgctcgtgccagtcgcgcatcacctcgaagcgcgggaagatgccgacatggcgcagcgcggcgatgcggccgagcagcttcaccatgccgcgggcgctttccggacgctcggtgacgcgcggcgaatattgcggatcgaccagcacgagatcggcgccgtcggcctggatgcgcgccacgccgtcctcgacctgcttggcggtctcgctcggatcgaggttgcgcagcaccgcattggtaccgacctgccagatcaccatgtcgggatgcatgtcgatcacttcggtctgcagccgcttcatcatctccggcgcgtcctcgccgcccttgccgcggttgagcacggtgatgtcggccgagggatattgccggcgcagttgcgcagcgagccggctcggataggtgaattccggcgccgacgatccgtagccctgggtcgaggacgagccgaacgcgatgatgacgaccggcttgccggcggcaagcttggccgcgacatgcggtagcgagccggtggtgttgggcacgccggtcggctgatggcagggcacgcggtggaagatgtcgccggcggatctggcgacctgcttgaccttgtcgagcgcctgggaggcgatgccgggctgctgcgggctggcggcgtcgaccgccatcgcggcgggcttgccgacatcaggccgtgcggcgtcggatcttgtcgcggcacccgatgacaatgccgcatgctggtcggcctggccggtctgggcgcgcgacggcgcgaccgacaacggcgcgagcagcaagagcgccgctacggcgcgcaggctccgccctgcatgagagcgaaaagggaacgcaaaacgcatcaactctgcttcctctaattctactgcaccgggcccagatgggccgcatcgatcacgaatttcgccagtgcgcggccgagacaggcgtgaaccttcttggccaggtcgacaccatgcgaggtgctgaacaggtcaaaatatccggcgtcgctccactgcttcataatcgagaaccggtcgaacagcggaacgtcgtgctgctgcgccaccaccttgatattgtcgagatatggcggcgcagagatcatcgtctccgtgcgcgggctgtattgcagattgaccagcaccacgtctgtcccagcgccccgtaacgcaacaacgccgtcgttgatggcggtccggaaatcgtcgggatcgaccgctcgcatagcatcgaccgtgccggtctgccagataaccaaagtaggcttttttgcttcgacaagcttaacaagggttcccgcggtctcttccgcggtgctttttccctgtaattctacggatagatcgatatttgcctgcggaaatgcctccttcagcgccgcctgcagcttggccggataggcactcgcctcgttgccctggatggtcgaggagcggctgcccaccaccagcacgttgagcggctggttggccttcaccgcatcggtgaccttcggcagcgagctctcgctcgacagcagataggcgggcacgtcgcagggcggcggcggcgcaggctcgggattgtcgccggcgcgcgcgggcgctgccgccaaactggcggccagcagcagcaggcccagcatcgtccgtgcggacttcatgctccccctcccgccagatcggcgttgccgaccgcaccttttttcgaggcgcctttgtcggcggagtgcttgtaccacgaaataatccacgccatgccgcacatgatgaggatgccgcacacgctgatcagggcgtgcagtgcggcaccgccagagacctcggcaagcacgaaatgaccggcaaaggcgaggaagaccccgagacagaatatctcaagcgaatgctggccacacaggatcaatggtcgcagccaccgcgatttcaagcccggccaatcccggggcaggaagcgcacggtgagggcggcgagcgccaggaaatgcgcaaaccgcaacacgtccaggtcggtcttgttgatcggatacatccattgctcgatgaccttcggcatgatgtggccgagctgcggcacgtaccaggtcagggtcacgaagaacgcggcgaccagatagacgatgcagatccacatcgtgatgttcgacgacaggatgcgcgacatccgccgcgcgccgccgagtgcgcaccaggcgccgaacacgaacaacaattgccaggcgaacggattgaacgcccagaagccgttcggataggccgacagatacagatcgaactgccaggtcagcgcgtagagcaggaccgacaggccgagcgtgacgtcgggcttccacttcatcagccacaggatcagcggcaggaacagcatcagcacgatatagagcggcagcacgtccatgttgacgggacggaagcgcagcagcagcgcctgcacgatggtgacgtcgggctgcttgaggaagtccatgatccccatttcctcgctgtacagcgggttctcgaacgaggtcgcgacataggagatctcggcgaggaagatcgtgaacaggaagacgtgcgcgacatagatctgccagacccggcgcaggatgcgcgcggtcgcgatcacgaagccgccctccagcatcgcgcggccgtagacgaaggctgcggtgtagccggagatgaagatgaagatctcggtggcgtcggagaagccgtaattgcggagcgtcagccaggtcaaaagattggtcggcaggtgatcgatgaagatcagccacagcgcgagcccccggaacagatcgagcctgagctcgcgctcgccggtcgccggcagtgtgatcgcgggcgcggccgccgccaccttcgcctcggctttggcctcagccaccggcgagccggctatgggatcggcaatcgagctcatcaaacaccgtgtcggctgcggacgctccgcatgcccagctgaaaacataatatcggtccgcgacttgcggacaaagcgcagagtgcggcgacatgcggccgcgctttagagcggaactatgttgaaagcgcgatgaacagactgtccccgggggccgggttttcacagcccggcaggcgattggttccggctgaccaattggctatgatggcgtcctgattgagtgtgatccggccgaaagtggatcacggccaagaccatcggattgagccgcatgtaccgcgccgttacccgccagatcgaagtcaccgtcgagccgaacttcatgccggagcgctcgtcggtcgaccggcgcgaatatttctggtcctacaagatcgtgatcgtcaattcgggtccggaaacggtgcagctgcggacgcggcactggatcatcaccgatgccaccggccgccgccaggaggtgcgtggcgagggcgtggtcggcgaacagccggtgctcgcgcccggcgaacgcttcgaatacacctccggcgtgccgctgccgaccgcctccggcttcatggccggcagctatcagatggtcaccgaagccggcgagcgttttgagatcgacgtgccgaccttctcgctggacagcccgagcccggacgggaagcgggtgttgaattgatgcgcttccgcgcacgccgctattgctccacgccggcttcctgcggcgtgaactcgtagaccgacgagcagaactcgcaggtcacgacgaccttaccgtccttgaccatctcggcgcgatcgttcggcgcaaaactcttcaacatcgacgacaccgcatcgcgcgagcacgagcactgtgcgcgcagcggttgcgggttgaagacgcggacgccgcgttcgtggaacaggcggtacaacagccgctcgccggacagatcgggatcgatcagctcgacatcctcgacggtcgagatcagcgactgtccctcgacccaggcatcgtcgtccggcacgctgtgcgtgaccgtaccatcgggcgcatcgccggggtgcagatcggcctgcttggcgcgctccggcgccttgggcaggaactgcagcaggatgccgccggcgcgccagtgcagcttgccgccctcgccgccgcgcatctcctcgccgaccgccagccggacccgtgtcggaatctgctccgagcgcaggaaatattcgtgcgccgcctcttcgaggccgccgccatcgagcgcgaccaggccctggtagcggctggtgttggagccctggtcgatcgtcatcgcaaggtgacccttgccgagcagttcgcccgaggtctgccccggcttgagctgcgccgcgtcgtaacgggcataggcacgcagccggtcgggcgcctggaaatcgacgatcagcagcgacaccgggccttcggtccgggtctgcaggatgaagcgcccctcgaacttgaccgacgagccgagcagcgtggtcagcacgatggcctcgccgagcagcttgccgactgccggcggataatcgtgcttgtgcaggatctcgtcgagcgcggggccgagccgggtcaaccggccgcgcaaatccagcgcgccgacctcgaaggccagcacggcatcgtcgacaggaaccgaagacggcgcgcgaaccggcgcctcggtcgtgattttgatgtcgggggattgtgaaaccatggcgctctatctggggtctcggaccgtgaaataaaggggttcactcaacgagggaacgtcgtcccggcgaaggccgggacccaaccacagagttctgttacgacacaaggcgtctccccttgtgccctttccacgggccgcggcttatgggtcccggctttcgccgggacgacagcgttgaagcggcgcttacgcgacttcgttaaagcaccaggccagaatgcccttctgcgcatgcaggcggttttccgcctcgtcgaacaccacggattgcggcccgtcgatcacctcgtcggtgacctcctcgccgcgatgcgcgggcaggcagtgcatgaacagcgcgtccggcttggcgagcgacatcagcttggcattgacctgatagggctgcagcacgttgtggcggcgctcgccctccttgtcgcccatcgacacccaggtgtcggtgacgacgcaatcggcgccacgcacggcggcttccgggtcggtgccgagcacgataggcgcgccggtcgccttgatccagtcgcgcatcggcttcttcggcgacagctccggaggcgtcgcgatattgagctggaacttgaaccgctcggcggcgtgcgcccaggacgccagcacgttgttgtcgtcgccggtccacgccacggtcttgcccgcgatcgagccgcgattttcctcataggtcatgaggtcggccatcacctggcagggatgcgagcgccgggtcaggccgttgatgacggggacggtggcatgcgcggcgagttcgagcagcgcgtcgtggttgaggatgcggatcatgatcgcatcgacatagcgcgacagcacgcgcgcggtgtcggcgatggtctcgccgcggccgagctgcatctcggcgccggtcagcatgatggattcaccgccgagctggcgcatgccgacgtcgaacgacaccctggtgcgggtcgacgggcgctcgaagatcatcgccagcgtcttgccttcgagcggcttcctgcccttctcatgcgccttcagcttcgccttcatggcggcgccggccgacagcatgttgcgcagctcgccgagcggcagctcgttgatgtcgaggaaatgacggaccggcttgctcattatccggccttcctcggctgcgccggcgacaatgtcgcgcaggcgcgctcgagcgaggcgatcgactggtcgatctcggcttcggtcacgatcaagggcgcgaggaaccgcaccacattgtcgccggcgccgacggtgagcagcttctcgttgcgcagcgcggtgatcagatcgccggacggcaccacggccttgacgcctatcagcaagccctcgccgcgcacctccgacagcacgccgggatagcggtccaccacggaggcgagcttctgcttgagcaacagcgacatcttctgcacgtgctcgaagaagccgggcttgagcacgacgtcgagcacggcattggcggcggcaaccgcgagcggattgccgccgaaggtcgagccatgcgagcccggcgccatgccggccgcggcctgcgcggtcgccagcaccgcgccgatcgggaatccaccgccgagcgccttggccagcgacatcacatcgggcgtcacgccggtgcgcttgtaagcgaacagctcgccggtgcggcccatgccggtctgcacctcgtcgaaggcgagcaacaggccgtgctcgtcgcacagcgcgcgcaatgccttgaagaacgcctgcggcgcgccgcgcacgccgccctcgccctgcaccggttcgatcaggatgccggcggtgtgcggaccgatcgccttcttcaccgcctcgatgtcgccatgcggcacctggtcgaagccgtccatcggcggaccgaagccctcgagatatttcgccgagccggtcgcggccagcgtgcccagcgtgcggccatggaacgcgccctcgaaggtgatgatgcggtagcgctcgccatggcccttggagaagtgatgatggcggaccagcttgatcacgccctccatcgcctcagcgccggaattgcagaagaatacgaagtcggcaaagctctgctcgcacagccgcgcggcgagcacctcgccgtcggggctcttgaacaggttcgacatgtgccacagcttggtcgcctgttcctgcagcgccttgaccagatgcggatgcgcgtgcccgagcgcgttcaccgcgacgcccgaggtgaaatcgagatagcggtcgccgttggttgcgatcagccaggcgccctcaccgcgctcgaagccgagatcgaccctggcgaagacggggagcagatgcgacggggcgctgttggtcatggcgttcactgccggtttggggccgacaattgccgcgcgcattgacgccagcgcagcaacggccagcttcggaaaacaaaacggccgcctttgcgggcggcacgtggggtcattctatgctgcggccggtcggtgtcaatcgccaggagccgccctttgccggccgtcctgcaatgccaaaccagcgcaatccggagcattccggtgcagtggaaaagcctcatagcaatgcttaactttgtgggaacatgtggacgcacgaccgcggactcttgcgccagagtcacgccatattgtagcgtttggcctgtcgggtacgacatctcgtgcggcagtactggaccctctaagtagccttcgtgtctcacgtaaacgttcgggcgcaacatcgtgtccggcgagggctaagggattctggccgcagggatatttgtccagatttggctcgcagcgccgctccaatgactggccggcgccatgcgaaaggaagaatgcgatgacggtattgacctggtccgacgatcgcgtcgagcagctgaagaagctctgggagtctggcctttcggccagccagatcgcagcggaacttggcaatgtgacgcgaaacgccgtgatcggcaaagtgcatcggctcggcctctccggccgcgccaaggccccctcgaccgccgcgccgcggcagcgcaaggcccgtcccgcccagcacatgatgcgggtggcgcgcccggtttcgcgcggcaacaccgcgctcgcacacgccttcgaggtcgagatggagcccgatccgatctccttcgacaacgtggtgccgatgagccagcggctgtcgctgctcgagctcaacgaggcgacctgccattggccggtcggcgatccctcgagcccggaattcttcttctgcggcggcaaggcgctcgccggcctgccctattgcgcacatcactcgcgcgtcgcctaccagcccgccgccgatcgccgccggccatcggcgaagccacagatcaagtaagcactcgggaaacgacggaagacttcaaaacaaatccccgcgaaagcggggatttttttgtggtgcgcagctcgtcatggagccaacaggacgacgccgtgttgtggcctgtgatcgcgaccaagccgttacggctgcggctcggctttcgcgaagcggtcgtcgagcgcatagccggcgccgcgcacggtgcggatcggatcctgctcgcggcccggattgagcagcttgcgcaggcggccgatatgcacgtcgacggtgcgctcatcgatgtagatgtcgcggccccagacgctgtcgagcagctgctcgcggctgaatacgcggccgggatgctcgaggaagaattcaagcaggcgatattcggtcggcccgagatcgatcgggcgccccgaacgcgccacgcggcgcttctcgcggtcgagctcgatgtcaccataggtcagcacggtcgcaagccgctccgggctcgcgcggcgcaacaggcccttcacccgtgccagcaattccggcaccgagaacggcttgacgatgtaatcgtcggcgccggtggccagcccgcgcacccgctcgctctcctcgccgcgcgcggtcagcatgatgatcggaagctgcttggtctcgggccgcgcccgcaaccgtcggcacagctcgatgccggacaggcccggcagcatccagtccagcaccacgaggtcgggaacgcgctccttcagccgggtgtcggcatcgtcgccgcgccccaccgtttcgacatcgtagccttcggcatcgaggttgtagcgcaacagtgtcgtcagcgcttcctcgtcttcgactaccagaatgcgtgcgctcatcggtctaagttctttctctgtggtgatccgttgccctgacgcaaaccgaaacgccgtcgactacgtgttacccggcaccgtggtggcaaagttggtcatgtcgcccttcgggcgcttgtcggtgatctgctggccttcgatcatgtagaacaccgtctcggcgatattggtggcgtgatcgccgatccgctcgatgttcttggcgcagaacatcagatggatacagaatgagatgttgcgcggatcctccatcatgtaggtgagcagctcgcggaacagcgaggtgcagatcgcgtcgacctcctcgtcgcccttccagacgttcatcgccgccggcaggtcgtgcgcggcataggcgtcgagcacagacttgacctgcgacagcacgaggtcggtcatgtgctcgaggccgcggatcagcttcagcggctggaagtcgctttccagcgccgcgacacgcttgcccatgttcttggcaaggtcgccgatccgctcgagatcggtggccacgcgcatcgcgctgacgatctcgcgcaggtcgatcgccatcggctggcggcgcgcgatcgtcagcaccgcgcgctcttcgatgacgcgctgcagattgtcgatctcgatgtcggcggcgaccacgcgcttgccgagcgcgacgtcgcggcggatcagcgcgtcgaccgactcggtgatcatccgctcgacgaggccgcccatctcggcgaccaggcgggtcaactcctgcaggtcgctgtcgaatgccttggcggtatgttcagaagccatcgcttgtctccctcgatcatgatcccttggggaccatgatctcgtgtccatatttcagcatgatccgatcggaaaaccggttgccacttttccggatcatgctctaaccgaaccggccggtgatgtagtcctgggtgcgtcgatcactcggtgaggtgaagatcttgttggtgtcgtcaaactcgatcagttcgccgagatacatgaaggcggtcttgtcggagacgcgcgccgcctgctgcatgttgtgggtcacgatcgcgatcgtgtagtcctcggagagctcctggatcagctcctcgaccttggcggtcgagatcggatcgagcgccgagcagggctcgtcgaacaggatcacttcggggcgcaccgcgacggtgcgcgcgatgcacaaccgctgctgctggccgccggagagcgacaggccggaggcgttcagcttgtccttgacctcgttccacagcgcaccgccgcgcagcgccttctcgacccgatcgtccatctcggacttcgagatcttctcatagaggcgaatgccgaaggcgatgttctcgtagatcgtcatcgggaacggcgtcggcttctggaacaccatgccgacccgcgcacgcagcagattgaggtcgagcttgggatcgagaatgttggtctggtccagcatcaactggccgaccgcgcgctggcccggatacaggtcatacatccggttgaagatgcgcagcagggtcgacttgccgcagcccgacgggccgatgaacgccgtgacgcggttggtgccgagcgtcaggttgatgttcttcagcgcgtggtgctcgccgtaatagaagttgaggttgcgcaccgtgactttcggcggcgcttccggaagcggaacctggggaacgtggcccgcggcggtcgtggagacggaaagctcggtcattttgcggccctttcggcaccaaggatacgcgcgccgatattcagcgcgagcacggtgaatgtgatcagcagtgcaccgctccacgccagctctttccagtaggcgtaggggctctgcacgaagttgttgatggtcaccggcaggttggccatcgtcttggtcagatccagactgaagaactggttcgacagcgcggtgaacagcagcggcgcggtttcgccggcgacgcgtgcggtcgccagcagcacgccggtgatcagacccgaccgggccgcacggtaagcgatccgcttgatcaccagcgaacgcggcaggccgagcgcggaggccgcctcgcgcagcggattgggcaccagcagcagcatgtcctcggtggtgcgcagcacgaccgggatcacgatcacggcgagcgccagcgcgcctgcgatcgccgagaagccgcgcatcggcaccacgaccgcgccatagatgaacaggccgatgatgatcgagggcgcactgagcaggatgtcgttgatgaagcggatcaccgaggtcagcttgtcgtgcttgccgtactcggcgaggtaggtgccggcgaacaggccgagcggcgcgccgatcccgacgccgatcacggtcatgatcaccgaaccgacgatggcgttgagcagaccgccatcggtcgagcccggcggcggcgtgttctgggtgaatagctgcacgctgaggccagcaaggccgttgtagaccagcgtgatcaggatcagcgccagccaggtgacgccgaacagcgccgcgccgacgcaaagtgcacggatgacgatgtcgctgcggcggcgggatttgtagatcgggttcatggcgctacttccccgctttcgtttcaagccgcatcagcatcagccgcgcaccggcgagcacgaagaaggtcagcacgaacagcaagaggccgagcaggatcaggccggactggtgcaggccgtcgctctcggcgaattcgctagcgatcgccgccgagatcgtggtgcccggcgcgaagatcgacgacgagatgcggaacgagttgccgatgatgaaggtcaccgccatggtctcgccgagggcgcggccgagcgccagcatgatgccgccgatcacgccgacgcgggtgtaggggatcactacgctgcggacgacttcccaggtggtgcagcccatgccgtaggcggcttccttcagcaccggcggcacggtcttgaacacgtcaaccgagatcgcggtgatgaagggcagcaccatgatggcgaggatcagcgccgcattgaacaggctgagataggacggcgggccggcgaacaccgcgccgagcaccgggacgccctcgaacagcctgatcatgaacggctggaacgtgttggccaggaacgggcccagcacgaagaagccccacatgccgtagatgatcgaggggatgccggcgagcagctcgatcgcgatgccgatcgggcggcgcagcatctgcgggcacagttcggtgaggaacacggcgatgccgatgccgacggggatcgcgatcagcatcgcaatcaccgaggtgatcagcgtgccgtagatcgggccgagcgcgccgagcaccggcggatcagccgagggcgcccagcgctgggtccagaggaaggcaaagccgtattccttcatcgccggccaggcgccgacgatcagcgacaggataatgccgccgaggatcaacaggaccgagatcgccgagatgcgggtgatccaataaaaggtgagatcaccgagcttgaaggcactgagggccttggcgcgatcgtaaggtcccgcggcttccatcacatcgctctgaacagccatgtctgccacgccaatcccctcgtttttatttgaaacttgcacaaaccgccacgcccccgaagcgatcttcactgacgcataaggccgggcgtcgttccggctgcgccaggggcgcgaaccccgggacccgcccgcgcttgttgccgcgatgatggagcccgggtcttaatcgcttggcctgcgccgccctcgagggacggcacaggccctgttcgaaacgtcggacttagctcttgatctccgaggaccaggtcttctcgatcagcttgacgaccgagtccggcatcgggatgtagtcgagctcttcggccgccttgccgcccttctcgaaggcgtacttgaagaacttgagcgcttcctgcgaggccgccttgtcggtcgattccttgtgcatcaggatgaaggtcgccgcggtgatcggccaggaggcgtcgcccggctggtcggtcaggatcacgtagtagccgggggccttcgaccagtcggcattcgacgcagcagcctggaaggcggcgacggtcggctgcacggtcttgccggccttgttgaccagcgccgtgtaggtcagcttgttctgcttggcataggcgtattcgacatagccgatcgcgttcttggtctggctgatgttgccggcaacgccttcgttgcccttggcgccgacgccgaccggccactcgaccgcggtgccggagccgaccttggacttccagtcggcgttcgacttggagaggtagtcggtgaagttgaaggtggtgcccgaaccgtccgaacggcgcacgacggtgatcgcgtcacccggcagggtcagcttcggattgagcttggcgatcgccgcgtcattccacttggtgatcttgccgagatagatgtcgccgagcacttcgccggacagcacgagatcgcccggcttgatgccctcgacgttcacgaccggaacgatcgcacccatcaccatcggccactggacgaggccgtccttctcgagctgctcggccttgagcggcgcgtcggtggcgccgaaggtcacggtcttggcctggatctgcttgatgccggcgccggaaccgatcgactgatagttcaggccattgccggtgtccttcttgtaggcatcagcccacttcgaatagatcgggaacggaaacgtcgcgcccgcgccggtaatatcggcagcgaaggccgacgtcgaagcggccaccatgccggcagcgacgattgctttgatgaaattcatggggtggtctccatcttgtgagcgaagcgccgaatgcgcccgatcgcgctcacgccggtccatctaggagcggtcggtgccgcttttacgaaggttggatgacacttggatgacagagctaagcaactgaaaatgcttagctttgagtcggtagcggggtcttcggccggggaaaacaggcagtaaaagtcgcgccattgttcggcacgctctcgatcagaagacgcccgcgatgacggttaagaatatgtttcaccagcgataatccgaggcccgttccgccctggttgcggctgtcgccgacgtccacccggtagaagcgctcggtcagccgcggcaggtgctcgggcgcgatgccggggccgaaatcccgtaccatgacacggatttcggggcttccctcgcccgatccgcccggaacggtctgattgagcgacactatgacgcggccgcccgaggcgccgtatttgagggcattctcgatcaggttctcgaacaggcggagcagttcctcgcggtcgccggcgattctgaccggggcttgcggcaggtcgacctcgatctcgacctggcgctcgctggccagcatctcgagcccgtcagccacctcgcggatgataggcacgatgtcgatcgaggcctcgggccgcacatgggccgacagttcgacccgcgacagcgacaggaggtcgtcgatcagccgcgccatgcgggtggcctgggtgtgcatgatgccgaggaagcgttcgcgggcccgcgcgtcctcgcgcgccggcccctgcagcgtgtcgatgaagccggacagggcggcgagcggggtgcgcagctcgtggctggcattggcgacgaagtcggcgcgcatctcctcgacccggcgcagcggcgtcaggtcgtggaatgtcatcagcatgcatttctcggtgccgccgaactgggtcggcaccggcaccggcgtgatcaccaattccatccagcgatcgaccggaacgtggtccgagtaagtggcgcggcgcggctcggtggtcgcgatcgcctcgcgcagcgcggtgatgatttccggcgaacgcagggcaaattgcgccaattcgttcctgcgcagcgccggcgcgagctgggccgcggcggcattgagatggatgacgcgcccggcgcgatcgagcagcacggccggatcgggcatgccggcgacgacggcgctgaccgcggcagcctcgaccggattgacgccgcggacgtcctcgcgcgaagtcccggcatcatgcagccgccaaggcaccagcgctgcggcggcgatgcagacgaacaccgcgcaggcgcgcaccagcgacaattcgccgagcgcgaccaccacgctgagcgccagcgccgcagcaagcaggatcagcgcggaatggcgcaggcggtcgggccagggtgcgaagatggattgcggcgtatcgtcaattgccatcgcggcggctttcttcccgtcggttcgtgtctcgcccaggcgcggtcacattgaccgtccctcgggaggcatcgggccgcgtcatcagaccccggaatcgccccgcttgcggaccagaaccgcctcgtggtgcggctcggcgcggggacccgaatcagtctgcggcagccgtttgagtcgggcgccgacgataacctcccgaaacgtcagcaagattacagatatgacgaacggcgcaatatagtagagcagccggaacagcagcataccgccgagcaggtcctcgcggtccatctgccagaggccgaccagcatggcggcgtcgaacaccccgagcccgccgggggagtggctggcgaagccgagcagggtcgccgacacgaagatgaccgcgaccacgacgaagccgagattgggctcgtccggcaccagcacgtacatcgcgagcgcgcagaagccgaggtcgacgatgccgatcgcgatctgcagcagcgtcagcgggccgcccggcagggtcaccgtccaggggccgcgaccgaccacccgcggctgggtccagacccagaccacataggcgaccagcgcgataatgatgccgaacgccagcgtgcggttgagccagggcggcagctggtcgatgttggccgcggcctccgggtgataggcgatgccgagcccgagcaccgcggcattgccgagccagaaggtgaggccggcgagaaagcagatcttggcgacgtcgatcgcgtttagtccccaggccgaatagatccggtagcgcaccgcgccgccggtgaagacgctggcgccgacattgtggccgatcgaataggaggtgaatgccgcgagcgcattgatgcgatagggcacatgggcgtggccgatcgcgcgcaccgcgaacaagtcgtagaaggtcagcgtgaaatagccggctgcgacgaatagtcccgccagcatgatctgccgcggctcggtgctcttgatggcctcgagcacctcgttggtgtcgatgccgcgcagcatgtggtagaggacgtagcaggcgatgccgatgacggcgatgctgatgacaacacccagccgatgcaggagttgcttctggcgtagaaacgccatcgccctgcctattgcttccagcatctagacctcgaattgcgatcccgcgacgacggcccccggcgatctccgccggcgcttcgctgtgccctgccccgtgtagcgcgttttaagccggagtggaattcgtcaaacgacaataaaacgcgcatcttcaagatattagggatgattcatgacagcgggtgcacaaatatgcgcgtttctcgccaccttcgacaaggcttgatgtcgatgtgcggcagttagcccggcgaaaggtacacaagaccatccgggaaactacggagagtgacgcgccgcgcggcagccgatcaacgaaaatcgccgccgcaatgatcattacgacggcgaggcggcaagtccgtgcttcgttatgcccgcgcggtagtcactgcggcgacgatttcttcggcatcggggaaatgtcccttcacgcgcctggcgatcactttgccgtcaagcttgacctcgaagacgccgcccttgccgggcaccagctccgcatcgaggccaaggcgttcgcgcagcagcgtggccgcctccctggcgcgcatctcgtagccgcagggacggcaataggtgatcgagagatcggtcatggcatatcctcccggtcgctcatgctgcggcaagatgttgcgcgctcgcggcctcgatgccggcgatccaaccggcaaccgagcgaccgatcgcttccggatgatcctcctgtagataatgcgcgccggcgccgagctggatgaccgcgcaatgcttcagccgcgccgcgaaatccgctgcaaaggccggcgacaccaacgcgccgggcgagccggtgaacaacagcttcggataggtcgatgccgcaagcgccacgtgcgccgtggtcagcgcctgatagacatcatcaggctcgcctgcgatcggcagctcgcgcggcagcatcaacgtcggcctgcggctctcgcgcgtcgcgaacggcgcgcggtaggcttccatctcctcgtcgctgagcgtgcgcaggatcgagccgggcagcacgcgctcgacgaatgcgttgttgtcgaggaccatcgcctcgccgacgcccggcgtgcggaatttgcggaacgtctccctggcggcctcgtgctggtggaagtcggaccagtcccgcatcggacggatgaactccatgaaagcgaggccgcgcaccaattgcggacggcgcgccgcaaggtggaaggcgagcgcggtgccccaatcctgggcgacgagataggccgaggtgatgccgagttcgtcgatcagcgcgtcgagatagtcagtctggtcgaagaagcggtaggcgatatcgggcttgccggactggccgtagccgatcagatcgggcgcgatgcagtgcccgaccggcgccaccagcggcatgatgttgcgccagatgtaggacgatgtcggattgccgtgcaggaacagcacgtgcggcgcgtcgccgcgcccggtttcgcgataggccatcgtggaggcgagcacgggccggtgatgcaggctgatctcgtcggatagcgtcatggcaactccttgaacacggtttggaatgcgatcgtcttgaaacgttcgagcgcggccgcgctgcgttcgaccttcatgcgcagcatggcgccctgccaggatgcgagcaggaaatcggccagttcatcggcatcgaagtcggacgcgatctcgcgcgcggcctgggcttccgcgatgcaggcagcaaacggcgcgcgccattcccgaaagatctcgtcgagttgctcgcgcagcatctcgctcgagcccgacgcctcgaggctgaaatcgccgatcaggcagccgcgggtgaagccgtcatgggcaagcttgccggtgatgagatcaagatagcgccgcagcctgtcgcgcggcggcagcgaggtgtcgctgagggcttccgcgacgaggccgcgcacatagaggaagtagcggtcgagcacttcggatgcgaacagctccttggagcggaaatggttggtgaacgagccctgcggcgcgccggcggccgcggtgacgtcgcgcacgctggtgccgtgatagccggtccggaacatttccttcaggccggcgtcaaggatggcatcgcggagagagggctttggcatggacgccatttaatacgtacgtacgtattgttgtcaagcacaaagatggatgcggcgtgcgccccgcttggcgacaccgctcaggcgcgatggatcaagggtttggggtcagctcgcgggcttgctgcgcgagaccacccagtcgcgcaaccaggagccgatcgcgcagccgacgaggtagagcgcgaacatcatcaggaagagatcgagccaatagccgaagcggccgggcacgacccgcgcgaacgatgccgccaccagcgcggcggcgagcagcgcgagccagcgcatccagagcttcgagacgccctgcgcccgatgcactaccgcgatccagcccatgcagaagccgagcagcgcagcgccgagcagccaaccccagacgaatgtcgcgagcacggtcatcgctacttcaccacgaattcgatgcggcggttctgcgccttgccatcttcactctcgttgccggcgagcggttgcgtgctgccatagccgatcggcgtgaagcggttggccggcagtccggcgcgcaccaggtaatccaccacggcctgtgcacggcgttccgacagcgcctggttggccgcctcctcgccgtcgctgtcggtgtggccggcaacctctatcgtcgcgttggggcagcgcatcgcggtctcgatcaggcggtcgagcaggccggccgagtcaggaacgatgtcggccttgcccgactcgaagcggatctttcccttcgacagggtctcggaaaacagctgctggcacacggtgggatcgaccggcgccgccgccggcttgaccgtgacctcggccttgtactgccagccctgcggaaaatccttgccgagcccttcgcggatctggcccgctgcggcgtcgtagagcgcatcgcccgacagcttcacctcgcgatccgacaccacgagcgttccggtcgacagccgcgacagcgcaccgagtgcgggcaccaccgcagccgcaaaccctgacggcgcgccaatgctggccttgagattgtcgaccaccttctcgctgaagaacttgcggccggcggcggcgaccagcgcggcatgcacgttgttgtcgggcacgtagccggtcagcgtcagcgtcaccgcgaccggatccttgtaggcctggaacacatagggcggcgccttgatgtcattggccgcgatcgaatagccgtccggcaggttcctcagcgccgccgcgatcgcttcgcgtccgccgagctcgcgcgccatgccggcaagcgcgaccttgttgtcggtcagcgtgatcttgccttccttcagcttgccgatctggtcgagcagcaacagcgccgccggatcgaatcgctgtggcgcgccgcgggcgagcgccatctgatcgaccacctcgacaccgccgagaccggccttcgcggcctccgtcagcttgctcttgctcgacggcagcggcgcattgccgccaagcgtgacgcgcaccacgtcgcgttccgccgaccacacatagggcttggcctcgggaacaaggcgggtctcgtcgttgaccagccgcacgcccggcacggcttcgaccgatgccaccgcgctgaggcggccgtcttcggagaaggcattggccgcaaacgtgacgtcgcggccatcgacgctgatgcggcgcttgtcgaggacggtgtccttcaacgcggcattcgagcgcgcggcaagatcggcttcaactgtcgccgttgaggtccaggcagcgataccccacaggacgaccagcggaatcacccccggccaccacttgctactccacttgaaaagtccgtgcattcagcgtcctgcgggtcgggaaccagagagaaaacaaacccttggctgactgtcaaaccccaaatccggaaccaaggcggggcaccatgtcggatatcgggataacagtttcttcagtggtctttcgctaagtttgcggcggaatgcaaatcggccggcccgtgccctcatgaaacaactccgcaacaccgtgatccgagccgggatggaggcgttgtatttttcgggtgcgcatatcctgctgcggccgattttcgcgggcgtcggcgccatcttcatgctgcatcatgtccgcccgcggcgtgccgacgcgttccagcccaaccatcatctcgaggtcacgccggacttcctgcgcgcgatgctgacgcatctgcgcgcgctcgacgtcgacgtcgtcagcatggatgaggcgcatcgccgcctcaccgaacggaatttcgcgcggcgcttcgcctgcttcacctgcgacgacggctatcgcgacaaccgcgatttcgcgctgcctgtcatgcgccagttcggcgcgccgttcacggtgtttgtcgcgagcgatttcgccgagggctgcggcaaattgtggtggatcgcactggagcgggtgatcgcggcggcatcggcgatcgaggtgccgatcgacggcgcgatgacccggctcgacaccgcgacgccgcaggccaagcgggccgcgttcggccgcatgcatgactggctgcgctcgctgccgggcgagacggagatgcaggacgcgatctcggcgctgtgcgcccgccacggcgtcgacgaggcgggcatcgcgcgcgagctctgcatgtcctgggacgagctgcgcggctttgccgccgatccgctggtcacgatcggcgcccacaccatcagccattgcaacctcgccaagcagagcgagaccatcgcatcgttcgagcttgcgaccagccgggcgcggatcgaggaagcattgcagcggcaagtcgcacatctcgcctatccctatggcgaccggatcgccgccgggccgcgcgaattcgcgctcgccaaatcgatcggcttccggaccgcggtgacgacccggccgggcatgctgtttcccgaaagcgccgaccatctgaccgccttgcagcgggtctcgctgaacggcaattaccaggacgcgcggctgttgccggtgctcacctcgggcgctgccaccgcggtatggaatggttttcgccggatcgatgcggcgtagagcctgcacatgtagcccggctacagacgctctccttccttgactcgatccccggccgcgcccagaaccactggcaacgcaatggaggaacgcatgttcaaggatctgttttcactgaagggccgcgtcgcgctggtgaccggaggatcgcgcggcatcggcaagatgatagcggccggcttcctggcgcagggcgccgccagggtctacatcaccgcgcgcaaggcaggtccctgcgaggccaccgcccaggagctcacagccgcctatgacggcgaatgcatcgcgctgccgatcgatatctcgacggtcgaaggctgcgacaagctcgccggcgagatcatcaagcgcgagccgaagctcgacatcctggtcaacaatgccggcgcggcctggggcgcggacttcgacgaattcccggagagcggctgggacaaggtgatgaacctcaacgtcaagtcgatcttcttcctgaccaaggcgctggccaagccgctgcgcgcggcagcgacgcacgacaagcccggcaaggtgatcaacatcgcctcgatcgacggcatcttcgtcaacccgatggagacctactcgtatgccgcgagcaaagccgcggtgatccacctgacgcgccggatggcaacgcggctgatcaaggacaacatcaacgtcaccgcgatcgcgccgggcgccttcaagtcggacatgaaccgcgccgcgcgcgaccatgccgacgaggtcgcgcagcgcgtcccgtcgcggcgggtcggcagcgacgaggatatggcgggcaccgcgatctatctcgcctcccgcgccggcgactatgtggtcggcaacaccatcgcggtcgatggcggcgtggtctacgcgaccgccggactggagatcgcggggtagcagccgcggctctcacaagcatcaggcattcccgcgccggtcagcgggacggtgataaggggcgcctcgctggtagcgtggcgcccttctttgatcatgcggggcaatggacccgccgagaggcggggccgaattagccgccgtgctcagctctggccacaggttgtgacacctctggcatttgtcattcaaatgcattacattgactgcaaacaaggagggggcgctatggcgtcgaatgccctgatccaaacccgcattgatgcgggcgtaaaggaaaaggccactgcggttctagagaacatgggcctcacggtgtccgacgccgtgcggatcctgctgacgcggacggccaatgaaggcatgcttccactggaactcgtaagcagcagccacgcttacgacggctggtttcgcgagaaggtgcgccaggccctggcggatacccggcccagcctcgatgattccgaagttgaaacgcatttcgcgcaacgtcgtgccgccgcgcttcgaaaagcggcggagcgcaagcggtgaaactcgtctggtcgcgcttcgcattgtccgatcgcgacgatattttcagttacatcgaagccgagaacccacttgccgcggttcatgttgacgagcggattgccgatgccgcgcggcgcctgctcgactttcctgacagtggtcggtccgggcgcgtcgcaggcacgcgcgagctggtcatcccgcgcacaccttatgtcgcggcgtaccttgtcgacagtgagactgttcgcatcttgcgcgtgctccacggcgcgcagatgtggcccgacgaacttgcaaatgacgattgaggccggcttcataccggcatctggccgaaaaagaaaaggggcgagccaggaccttgttcggctcacccctttccgcccctccgggaggagaggagctgaagatcagctctcgatcctcacatactcgaaatcgcccggcttgttgtcgatgccgaccttgggcgccgagatccaggaggcgaactcgccgggttcggtgaccggcttcatcagcgaggcgatgaagtcgccgtccgcggccgacggcagccagtcgttcttgcggctcgcccaggtcgcgtcgtcgatcaggaggccatcgggcgtcgcatggacgtccttgaactcgccgatctggcggtggaaggcggtgttcggcacctggagcttgtagtcgatgcccgcggtcgagatcaccttgttccagcgcagcatgcccttgacgcaatcctgcgtgtaatcgtcgcgcagccgcatgttgagcgcggtcagcgccggctcgtcgaccatcttgatctggccgtccaccatcttcatgaccggataggtcgagttcttgagctggtggtcgtcctcgatcgtggtttccttgtagcgccccttgatgccggcattgaaggcgttggccgcgttggtcgacacttcggagccgaacagatcgagcgacagcgaatagtgcaggttcagcttcttctggatggtcggcaggtcgatgacgccgagcgcgcggatcctggcgatgtcgttcggatcggtgatgccggcttcgttcatcgcatcgcaggtgcgctgcacgacccgggtgatgccggtctctccgacgaacatgtggtgagcttcctcggtcagcatgaagcggcaggtgcgcgacagcggatcgaagcccgactgtgccagcgaatgcagctgcatcttgccgtcgcggtcggtgaagtaggtgaacataaagaacgacagccagtccggtgtcgcctcgttgaaggcgccgagcatgcgcggtgaatccgcatcgcccgagcggcggcggagcaaatcatccgcttcctcacggccgtcgcgaccgaaatacttctgcagcaggtagaccatcgcccagagatggcggccttcctcgacattgacctggaacagattgcgcatatcgtagagcgagggcgcggtcttgccgagatggcgctgctgctcgaccgaggccggctcggtgtcgccctggatcacgatcaggcggcgcagcatcgcgcgatgctcaccggggacttcctgccaggccggcttgccgtaatcttcgccgaacggaatgacgcggttttcctcctggggagcaagcagaatgccccagcgatattcgggcatccgcacgtagtcgaacttggcccagccgcgcggatcgaccgaataggcggtacgcagatagaccagcgactcctggaagccgtccgggcccatgtccttccaccagtccatgtagccgggatgccagccttccagcgccttcagcacctggcggtcttcggcgagattcacattgttcggaatcttggtcgagtaatcgacgttcatgatgttcatgttcatggccgtgctcccttaaactcgcgtcatgtcgaattgcgccttctggccggtgccgtagcggcgcagcgcgccgtcttcgccgactgcgttgggccgctggaagatccagttctgccacgcggtgaggcgcgagaagatcttcgattccatggtctcgggaccgacgaagcgcagattggcttccatgccggtgaggccgtcgggcgagaacgaggtgcgttcctcgaagaacacgcggacctcgtcatcccaatcgatatcgtcgagcgcgaaggtgacgaggccgagctcctcggcctcctcggcgtcgagcgccttgccgatcgcggcctgcgcgcgctccaggtccattgggtcggcctggaagcgcgattgcaagcgcgtcaggccgtggctcatcggatagggcccgaaattcatcgcggtcagctcgatcgccggcggcggacggttgtcgccctgcttctggccgatcagcatgtaggagcggtcggcggcgaacacgagctcggcgagcgtaccgacgaagcaggagccgggctctaccagcgtcaccagcgtgcgcgaggtgacgtcgatgcgcttgagcacgcgcttccagtaatgcctgatctcgttgaccagccaatgcgccttgttggcctccaggaacgcgtcatgggacacgacgttggcgcggtcgccatggctcttgaacaccagcatcgcgataccgagctcattgatgcgcagatgcaggatcgcgtcgtcgagctcgcgggcgacctgcagcggccagaacgcagcgccctgcccgaccatgccgtcgatgtcggcgggagccgcagcctccggcgccttgatcgagatggtggcgatgcgcgcggcgcgatcgatgtcgacgctgacgaagccgtagaggatcgcgctgtcgtcgatggtgcgctccaacggcgtcagcgctaggcccttgcccgctccgttgcgcttcgacttcgcggcgaattccttgacgcgctcggcgagcttgccctcgagcttggagttcggcgcgatctcgtcgaccagccgccattgcaccgcgcgcttgcccttgatgccttcctcgatggtgcagaagaaatcggcgtggtcgcggcgcaccttgcgcttgtcgacgacgcgggtgaggccgccggtgcccggcagcaccgcgagcagcggcacttccggcagcgcgaccgcggcggcgccgtcgtcggccatcatgatgtgatcggtcgcgagcgccagctcatagccgccgccggctgcggtgccgttgacgacggtgatgaagctctggccggaattctcgctggaatcttccaggccgttgcgggtctcgttggtgaacttgcagaagttgaccttgtgggcgtgggtcgagcccgccagcatgcggatgttggcaccggcgcagaacacgcggttcttgcccgagcgcatcaccacgaccttgacctcgggatgctcgaagcgcagtcgctgcacggcatccgccagctcgatgtcgacaccgagatcgtaggaattgagcttgagctgatagccctcgaacaggccggcgttctcgtcgacgtccatggtcagcgtcgcgacgtcgcccgcgacgtcgagcttccagtgccggtagcgcgacggctcggtctggaagtcgatgtacttcgccccgcctgcaaggacgcgatcgtcaccagccatgggccacccttacctgttgttcgttgcgatggttcgtcttgccttcatgcacaataatgcatgtttttgacctagtccagttcaaaccgcaaaaacatgcattttgtttcatgtttgggaaaatcacttgctgggccaatggcctaacaccggcaggaaatgtcaggccgccagcgccgggtcgtcgcgcagcgccgccttggcgaattcggtgaccgcgtccagcgtcaccgccggcgcctcgcgatgcggcgagtgaccggcacctgcgatcgctgtgacatcgaccgggcagtagcactcggcctcggcgatctcgacctggcgcatcgtgccgtattgatcgtccgcaccctgcacgatcagcacgggcacgcggatataggcgagatagtcggagatatcccaatcgcggaatgccggatcgagccaggcgccgttccagccgtagaaggcgttgtcgacatccttgtgccagcgcgccagcttctccttcagattggtggtctcgtatgcggtcttgatctcggcgatcgacttgaccgagatgtcctcgacgatgaagtgcggcgcgagcagcgcgaggccttgcaggcgatgatcctggtgcgcgccggcatagatcgccgcgatcgacgcaccgtcggaatgtccgagcagcaggccacgttggaagccgatccgattcagcagctgcggcagcacgtcgagcgcctcgcgatgcatgtagtcgaccgggcgcggcagcttcgccggcgacgacgcgccataacccgcgcgcgaataggcgaacacgccggcgccggtcgcagctcgcagcttctcggggaagtcgccccacaggccgacgcagccgaggccttcatgcagcatcacgatggtcggcgctgactcgggtgacggaccgatcatgcggtattcgagatcggcgccgtcgatggtgaggaagcctgatggattcaagtttgtcatgatggggccttcctcaatcgtcgtcccggcgaaggccgggacccataaccacaggcttcagttgttgcgcaaaagccgtcgaactgcatctctcaaaacaatcgccgcggcgtatgggtcccggccgtcgccgggatgacatgtggagagttattgcgcaccgtcgcgcaacttgaaccgctggatcttccccgtcgcggtcttcggcaggttgtcgaccacgtcgatccagcgcggatatttccacgggccgatcttctgcttgacgtgctccttcagcgcctcgtgcaagccttcggccgagctctcgggccgcagcaccacataggccttcggcttgagcagaccttccggatcggcttccggcacgacggcggcttccagcaccgcgggatgggtgatcagcgcgctctcgacctcgaacggcgagacccagatgcctgacaccttgaacatgtcgtcggcgcggccgcagaaagtgtaacggccatcggcatcacgcgtgtatttgtcgccggtgcgggtccacgcgccctcgaaagtggcgcggctcttggcgcgttggttccagtagctctcgccggccgagggcgcatcgaccagcaattcgccgacctcgccatcggcgacgtcggcgccggcctcgttgaccagccgcaccttgtagccgggcaccggacggccggacgagccgtatttgatgtcgccgggcgcgttcgacaggaagatgtgcagcagctcggtcgagccgacgccgtcgaggatgtcgacgccgaaccgcgcgcgccaggcattgccgaccgattccggcagcgcctcgccggccgaggtgcagacgcgcaggcgatcgccgccgctttgcgtcttggtcgcctcgtcgttcagcatcgccgcgaacaaggtcggcacgccgaagaagatgctggggtgatatttgttcatcagcgcgaacatcacagccggtgtcggccgctccgaattcaacacggtggtggcgccgaccgacatcgggaaggtcagcgcattgccgagcccataggcgaagaacagctttgccgccgacaggccgacatcgtcctcgcggatgccgagcacctgctttgcgtaggtttccgcggtcgcggcgagattggaatgcagatggcgcacgcccttcggcatgccggtcgagcccgacgaatagagccagaacgccggctcgtcggcgtgggtcggtgcggtcgcgaacacgtcgctctcgcgcgcgatctcgtcggagagcttggcgtggccgtgcgcgtccttgccggagaccacgacatgcgcgaggtcgggcatgcgcgcgacgatgtccttcacgaccggtagcagcgcctccgacacgaacagcacgcgcgcgcggcagtcgccgaggatgtaggcgtattgctccgcggtcagcagcgtgttgagcggcaccggcaccacgccggcgcggatcgcgcccaggaacacgatcgggaaatcgaccgtgtccagcatgatcatggcgacccgctcttcgcggcggacgccgagccggcgcagcatgttgccgacccgccgggtctgctgctgcaactggccgtaggtgatttgcgaggccgtgtcgtcgaacacgaccttgtcgccgcgaccctcatcgacgttgcggtcgagcagccaggagactgcgttataagtcatgccccgctccccggaccttgcttgggacccagacgcgccacgcttccctctcctgtgaatttaagaattataattcatacaaggccaccagctcggcttgctgtcaatctttatcggcattatgtttcctagactaacggcctgattcagccaggaccgcgcgtcgcacagggatcatgaccgcagccaacgatccggaaaccgacttcctcgaacagctcggccagcgggtgcgcaccacgcgcggcctggccggcatgtcgcgcaaggtgctcgcaaaagtctccggcatttccgaacgctacatcgcccagctggagagcggcaaaggcaatgtctcgatcgtgctgctgcgccgtgtcgcaggcgcgatgggcgcgcatctcgaggacctgatcccctcgagcgagccggtgcccgattgggcggtgatccgagatctcctgcgcaaggcgtcgccgagccagatcgcgcaggccaaggacatgctcgccggcagcagcccgctggcgccacgccgcgcctctttctccggcatcgcgctgatcggcctgcgcggcgccggcaagaccacgctcgggcggatgctggcgaagaagatcggctggagctttgtcgagctcaacaaggagatcgaggcgcagaacgggctctcggtcgccgagatcatcgcgctgtacggccaggaaggctttcgccgcatggagcaggccgcgctgacgcagctgctcgcgcgcaaggagttgatggtgctggcgaccggcggcggcatcgtctcggaggcgctgaccttcgatttgatcctgtcgtcgttctacacgatctggctgaaggccgagccggaagagcacatggcccgcgtccgccgccagggcgatctgcgcccgatggccgacgaccgctcggcgatggccgagctgcgcaatattttggtcagccgcgagccgctctatgcccgcgcgtcggcagtggtggacaccgccgggctatcggtcgatgcagccgcggcgcggctgatcgattccgttcggccggtgctgcagaacgaggcgcgctcgttcgggctgcgcagcgtggcgctgtagctcggatgagctgataaaccggcgtcaaacgccggatgcgcagcagcaagtacagccttagttgctccgcgagcgcctttcagccaataattgcacatgaagttgctgttcttccacggctcacccggcaagctcaccgtcgccaaggcgctgctccggatgatgccgggacggctgatggacaaccacgcggcgattgatttcgcgcgtacaatcttcgactttggcgccccgggattttgggagctggtccatcagatcaggtattcggcgctcgacgccgcggccgaacacagcatccccctgctggtcacgacgttctgctacgccgagcctgaggatcgcgagcagttcggcaagtttgaggagatcgtacaccggcacggcggtgaactgctcccggtgttccttcattgctcaaggcaagaggcgctgcgcagggtcgacaatcccgatcggattgaaaggcgcaagatcacgtcaggcgagaacctgatcagatttctcgacagttacgacttcacggccgtgccgcgtgccgattgcctcacgctcgacacagggacggcttctgcggaagtgaccgcccggaacatcatccgccatttctcgctcacagcagcatcggcttgacggaagttgccgcctcgcgcaactgcggcagaaaacttccgatcatctgagccgccggcacgcgatcgacatgcgcgcccatgttgatggcggcgacgatggtgccgtcgtagcggcgcaccggcaccgagatcgagcggaaatgcggctcggcctcgcggtcgaccagcgagtagccctgcgcgcggtcggcgatgatcgtcgcgagcagttttttcggatcggtgacggtctgcggcgtcacggcatcgcggcgcatcgccttcagccgcgccgcaagctcggcatcatcgagccggccgagcatggcgcggccgaccgaggtgcagaacgccggcagccggtagccgatgtcgagaccggcggagaacacccgcgtcgggctggagcgcgccacgaacacgacgtcgtcgccgtcgagcagcgcgagcgaagcaatctcctgcgctgcggaggcgattcggtcgagcaccggctgcagcaccgtcaccacctggttggattgcaggaacgagcccgccaaggtcagcacatgcggggtcagcgtgaacagcttgccgtcggtggtgacaaaaccgccatgcgccaaggtgaacaggatgcggcgcgcggtggcgcgcggcagatcggcggcacgcgcgaggtcgctcagcgtcgccggaccggtgacggtgccgaacacctgcagcaggcgaagcccgcgatccagcgcctcgacgaagtcggtggcgcgctcgtcctggtcggtccgcttcagcttgggcatgatttgaatggttcaaaaattgggcttgctgtcggaaccagacatggcataattcgcacattcgttcaataggcgaacaaatccaaatccgggagacgccgccatgatgagccaggaagcgaacgatctgatcacccgcaccggggctaaggagccctgcggaaagctgatgcggatgtactggcagccggcggcgctggtcgacgaactggacggcccgcgcccggtacggccggtgcgcctgctcggcgaaaacctggtgctgtttcgcggcgaggacggcagctacgggctgatcgatcgccactgcgcgcatcgcggcgccgacctcgccttcggccggctcgagaatggcgggctgcgctgcgccttccacggctggctgttcgacacgtcgggccagtgcatcgagacgccggccgagcccgccggttcgaagctctgcaagggcatcaagcagcgctcctatcccgtggtcgagaagagcggcatcctgtgggcgtatctcggcgaaggcgaaccgccggccttccccgagctcgactgcttcgttgcccccggcacgcatacgtttgcgttcaagggccacatgaactgcaactggctgcaggcgctcgaggtcggcatcgatccggcgcacgcctccttcctgcatcgcttcttcgaggacgaggacacttcggcggcctatggcaagcaattccgcggcgcgtccgccggctccgacatgccgatgaccaaaatcctgcgcgaatatgaccgcccgatcatcaatgtcgagcacaccgaatacggcctgcgcctgatcgcgctgcgcgagctcgacaacgagcgcacccatgtacgggtgacaaatcagctattcccgcacggcttcgtgattccgatgtcgaccgagatgaccatcacgcaatggcacgtgccggtcgacgacgagaactgctactggtatgcgatcttcaccagctacgccgcgccggtcgacaagcagaagatgcgcgaccagcggctcgagctctatacgctgcccgactacaagtcgcgcaagaaccgcagcaacgactacgggttcgatccgcacgagcaggcgagcgcgacctataccggcatgggcagcgacatcaacgtccacgaccagtgggccgtggaatcgatgggcgcgatccaggaccgcaccaacgagcatctcggccagagcgacaaggcgatcgtgcagtatcgccgcctgctgcggcaagagatcgagaaggtcggcggcggcgagaaaccgatgctgttcctcgacgaggcctccgcgcgcagcatccagggcccggcgacgatggacggcatcgggccgacgctgggctgggagctctactggatggaggtcgacgtcaagcgccgccgcggcgcgccgtgggccgcccccgtgccgcgcgagatcgccggcaaggtgcagcatctgacggcggcggagtgatgatggctccggtgacgccgcactgtatccttcacctcaccccgcctgcggggagaggaagaagcaaaggagtgacaccttgagcttcgtcgagcgtcacggcctgtggtcggacgagcagaaggaggccgcgcaccgcctccgccgcatcgtcgaggagaggaacctcgaggtcatcaggctgtcgttccccgaccagcacggcatcctgcgcggcaagacgctgatcgccagcgaagccgtgcgctcgctcgagggcggctgctcgatcaccacgacgatgctcgccaaagacacctcgcacaagacggtgtttcccgtcttcaccgccggcggcggcttcggcatgaaggaaatggaaggcgcagccgacgtgctgatggtcgccgaccccaccacgttccgcgtgctgccctgggccgagaataccggctgggtgctgtgcgatctctatttcagcgacggccgcccggtgccgttcgcgacccgcaacctctatcgcaaggtgctcgatcagctcggacaccgcggctacgatttcgtcgccggcctcgaggtcgagtttcatctgttcaagctcgacgacacgcacatggcgccggaggatgccggccagcccggacggccgccgtcggtcagcctgctatcgcacggctatcagtatctcaccgagcagcgctacgatcagatggagccggcgctcgagatcatccgccgcgacatcctcgcgctcgggctgccgctgcgcacggtcgaggtcgagttcggcccgagccagtgcgaattcaccttcgcgcccactgtgggccttgcccctgccgacaccatggtgctgttccgttcggcggtgaagcagatcgcgcgccgccacggctatcacgcgaccttcatgtgccggccgaagctgccgaacatttttgccagcggctggcatctgcaccagtcgctggtgtcgcgcaccggtggcgagaacgccttcatggccaaggaaactggaaaggagaccggcgagcccttgagcccgctcggccgcgcctggctcgctggcctgctcgagcacgcgcgggcctcgaccgtgttcacgacgccgaccatcaacggctacaagcgctaccgctcctactcgctggcaccggaccgcgcgatctggggccgcgacaaccgcggcgtcatgatccgcgtgctcggcggagcgaatgatccggcgacacggctggagaaccggatcggcgagcccgccgccaacccctatctctacatggcctcgcaaattctctccggcctcgacggcgtcgaccgcaagctcgatcccggtccatccgccgacacgccctacgagaccaaggccgcgctgctgccgaagtcgctgcgcgaagcggtgttcgcgctcaacgacgatccgttcttccgcggcgcgttggggccggagttcgtggactattacgtcttcatcaagaacgccgagatcgagcgcttccaggccgaggtatcggactgggagcaccgcgaatatttcgagatgttttgaggttaagctatccgcttactccgctctttgtagaggttcgaaggcaacagcgcctccaacctgggcgaagacttcacgagaattcgcgcgctgaagggcttgtgtccactgccttccgagcgagctcgatccggcaagctggcttccgccgcgcagcttcttgcgcactgccgccagcagcgtctggcgctgcgaaacgctggaaaccagcacttcgtcctggtcagtggccggagcacgatatctgatgtccctgcagccccctggcggtgcttcataggcaagctgcgtttcgccattgtaggacagctgcaccagctgggtggacatgccagtcatgccatgaagctgaatcgggctaccgggtggcagtgcgtcgaccttgacggttcggacatacggattgcacttcgactttgcggacggatattgctgggccgcactgcgtacataggacaggacttcgccttcctggtagatcctgtcgattgtcaggccgtcagcattcgattcccgcagtgactggtcgaccagatgcgctccggtgaccggggaaggatcgaacgcgaagaccttcgatattcgcggccccttcaacttggtggccagagcggcgagctgcgcgaggccgccgccaagagagtgcccagtcgaaacgatctgcggcttgacggcggctcgcttgtagcaatcgagattctggaccgacttgatgatggcgtccacattgcggcgcagctgatgatagtagtcatcatagggagaaccgaaccggtccgcgttggagagccaatcgccaagcgacgttccaaccgttccgcgaaatgcaatgctgacttcgctgcaggccccgctggcgacctttgccgagcgcgcgcgagcccagacctggaaagccgggccgccactgaaactccagcctcggttgttgtaagcggcgaggcagtcagcgtcagtcggatcgatgcaggtgagatagctgtcacttccgaactgatatcgccaccgcttgaaggcttcccgcgcccgcggcttcactttttcatccgggaatatcgtctgaacggcgtagttcacatccgcgccgtagccatcggcatcctgcgttgcgcgccgggcattgaactcgtcgagaggcaggtaggccgcagacgcttggatcgcatagggagcgtagtatcttgcgtagttatagacgaatgaagcttgaatatagcgtccgtcggactgggccgtcgcaggaccaacattcgccgctaccaggggtatcgcgattgcgacgagcttcaatatcgaccaaaccgggttggatcgcatggcggcttcctccggaaaataaattggcaatctatgcgtgtatcaaagcacagcaaccagcggctgacaatatgccccgtgaatcaagcaggagcgacgctacccgcgcggcgggggtgcaactcgcctcgagatcagttgaacgccaatgacagcgatcgcatagatgccgaaaatgcccagagctatcggtgcgccgtcggcgatccgccacgccagtcgtacggtatcgtgggcgacgacgccgatatttccgccatagatcatgcagggaccgacaccgccctcattgggattgcagttcggattgaccagggatccgatcgatagcatcggcccgaaatagggtacgaaggcgcagaccaggctgatggcaagccccagcaacaatcggctcgagagacgcatccagcctttccagatcaggaaaaaccccaacgtcagccaaatcgccgccaagccatcgctgaaccggaggcctacaaaggacccggcctccagtgcgctgcggataatctcgccggccgaactcggcccgatctcgcacgtcacgttgctgcccgcctgacagcccttcagctttgcgacagccgaggttgcgaggacgacgatttctggaaggaacgtgagagcaatgagcagcaacagcgcccatctccagaatgatacatgcgagtatgatcttgattcagaattcatggcacggctgcgctggatcgaacggcgcgagcgcacaatcgctcactacccgtgatttagtcactgtacagtcaatatgagtggtccgctaccggaagtggcagtcaaccgccgtttgacaaccaagacgtggaggaggctctgcttcaaatcccgagatacttgtgctgcaggtccggctcggcgagcagctgctcgctggtgccgctccacaccgtcttgccgcgctcgatgatgtagtggcggtcggcgatgcgggcgaggttgccgacgttcttgtcgatcaccagcaccgattggccgcgccccttcagcatcgacaggcagctccagatctcgtcgcggatcaggggtgctaggccctcggtcgcttcgtcgaggatcagcagccgcggattggtcatcagtgcgcggccgatcgcgagcatctgctgctcgccgccggacagcgtgacgcccatattgctggtgcgctcggcgagccgcggaaacagcgcatggatcttgtcgatggtccagggatcggaggcaccgaggcgattgcctgaggcggcgacgagattctcgcgcaccgtcaggttcgggaagatctgacggccttccggcaccaggccgatgccaagttttgcaattttgtaggacggcaggccgcgcaccgcctcgccggcgaagcggatggcgcctgatcgcgctggcgtcaggcccatgatcgagcggatggtcgtggtcttgcccatgccgttgcgtcccatcagggcaaccatctcgccgaccttgatctgcaacgacatgccgaacagcacctggctcagcccgtagcaggtctcgatcccatcgacgtcgagcaaagtgtcagacatggcgcgtcaccgcatgctgctcgccgagataggcgcgcttgacctcttcgtgcttgcggatcgcgtccggcacgtcgcaggcgatgacgcggccatagaccagcaccgtgatgcggtcggccagcgcgaacaccgcctccatgtcgtgctcgaccagcacgatggtgacttccttgcgcagctccttgagcagcgcgaccatccgcgccgactcggtgacgccgagcccggccatcggctcgtccagcagcagaagctgcggcttggtggcaagcgcaaccgcaagctccagctcgcgctgctcgccatggctcaattgcgagaccacgatatcggcgcgcttgccgaggccgacccgctccagcgcggcgcgcgcggcctcgcgcagacgcgtctccttgcgcgcattgccccagaagcggaacgagtggccgtcatgcgcctgcgccgccagcgcgacattgtcgatcgccgagaagtccttgagcagcgaggtgatctggaacgagcgcgccagcccgagcctcgagcgcttgtaggacggcaagcccgtgacgtcgcggccggcgaagcggatggtgccggaattcggcatcacctggcctgtcaactggctgatcagcgtggtcttgccggcgccgttggggccgatgatggcgtgcagctcgcccggcaccacctccatcgaaaggttgtcggtcgcggtgatgccgccatagcggcgcaccagattgtcgacacgcaacaagggttcagccacggcgcatcctcccgagcagccccatgatgccgccgcgcgcgaacagcacgatcaacagcagcaccgggccgaggatcaggcccgagaattcggtaaactgcgacagcagttcctccagcagcagatagacgatcgcgccgaccacggggccgaacagcgtgcccatgccgcccaggatcaccatcaccatcaggtcgccggaacgcgtccagtacatcacggccgggctgacgaaatcggtattgttggcgagcagtgcgccggcaagcccgcagatcgtacctgatatcacgaagcagaccagccgatagcggttggcatggaagccgatcgcctgcatgcgctgctcgttggagcggacgccctgcaccacgagcccgaagcgcgaattgacgatgcgccagatcagatagaggccgccgaacaggcaggccaggcacagataatagaactggttgcgatccgacaggttgatcaggccggcgaagtcgctgcgcttgtagacggtgagcccgtcgtcgccgccgtaacgcgacaggccggaggcgatgtaataggccatctgcgcgaaggccagcgtgatcatgatgaaatagacgccgcgggtgcgcaggctgagcgcgccgatcaccagcgcgaacagcgccgagacgacgagcgccaccggccactggatgaaaccggagccgatgccctcggcggcgaggatgccgacggcatagccaccgatgccgagataggcggcgtggccgaagctcatcatgccgccatagcccatgatcagattgaggctcgccgcggccagcgcgaagatcacgatgcgggtgaacagcgtgaggatgaagatgttgccggtgacggccgaataggccggcagcaggagcagggcggcgcacagcagcgccgcgaccgcattggaggcgttgagcttgggcatcatcgtttggccgccgggaacagcccctcgggccgcaatacgaggatgatggccatcaggaggtagatcagcatcgaggacagcgccggcgccgcggtcgaagcggccgccccgctcaggaccttgcgcagcaggtcgggcaggaaggcgcgtcccatcgtgtcgatgatgccgacgaagagcgcggccatgaacgcaccgcggatcgagccgatgccgccgatcacgatgatgacgaaggcgaggatcaggatgttctcgcccatgccgatctgcacggtgaggatcggcgcctgcatcagcccggcgaggccggcgagcgcggcccccaggccgaacaccagcgtgaacagcagcttgatgttgatgccgagcgccccgatcatctcgcgattggaagcaccggcgcggatcagcatgccaacgcgggtgcgcatcacgacgagatagagcaaggccgcaaccgccagcgcgaccacgatgatcatcagccggtaggccgggtaatacaccccgggaacgatctgcaccggcacggtgagccaggccggcagtggcagcgcgaggccggccgggccccagatcagccgcacggcatcgttgaagaacaggatcaggccgaacgtcgccagcacctggtcgagatggtcgcggccatagagatgcctgagcgcgacgtattccagcgcgacgccgagcagcagcgtggcgccgagcgccagcagcgcaccgagcacgaagctgccggtccaggccacgaaggtcgccgcgaaataggcgcccatcatgtagagcgagccatgcgccaggttgacgaagtccatgatgccgaacaccagcgtgaggccggccgccagcaggaagagcagcaggccgaattgcaggccattcagcagttgttcgacgacgagatacatcgtgaggctacgtcaccttgagcgaagcgggttggggtgtccgcgcattgcacgctgcgcgttctccctcgccccgctcttgcggggagagggttggggtgaggggctgtctccaggatcgagctcttggaaacggcccctcacccaatcgcttcgcgattgacctctccccgcaagagcggggcgaggtgaagaagcaagccgcgcgccaaaaggcgcccgacaatcacttcatcgagcacttgtcgtggaatttgtcctggtcgtccttgacgatggtcgcgaccgtcttcaacgaaagctggccgtcggcatccttgaccacgtcctgcagatagaaattctggatcgggatgtggttgttgccgtatttgaacgggccgcgcagcgacttgaagttggccttctccatctcggccttcatcgcgtccttcttggtgagatcacccttcaccgcgacgacggcgctgttgatcagctgggcggcgtcataggcctgggcgccgtaataggtcgggcgcaggccgggatacttcttgcgatagtcctcgacgaacttcttgttctcggcgttcggcaggtcgttgacccattcctgcgcgccggggatgccgatcgcattgtccttctgcagcggcagcgacaattcgtcgatggtgaaggcggtgtagagcgggatctgcgccttgatgccggcctgtgcatactggttcaggaactggacgccggccgcgcccggatagaacacgaagatcgactcggccttggagttgcgcgccttggtcagctcggcggagaagtcgagctggctcggccacaccgtgtattcctcgccgaccacctcgcccttgaaggtgctcttcacgcccgcgagcatgtccttgccggcagcgtagttcgggccgatcaggaacaccgacttgacgcccttctggttcatgtagaggcccatcgcggcgggcgtctggtcgttctgccaggaggtcgagaacacgtaaggcgagcacagctcaccggcgagctgcgacgggccggcattggcggagatcaggaaggttttcgaatcgactgcggtcttcagcgaggccagcagcacgttcgaccagatgtagccgacgatgaagtcgaccttgtcggactgcaccagcttctcggtcttctgcttgcccacatcaggcttctgctggtcgtcctcgtagatcacctcgaccggcttgccgtcgatcttgcggccgagatggtcgagcgcgagctcgaacgaattgcgcatgtcgttgccgatcacggcggtcggaccgctgaaggtcgagacgaagccgatcttgacgctgtcagccgccgtcgccggctgcgccagcgccagagccatggcgcctgccagccaaaatgcctttttcatattcactcccctcctcaaccaaagattccgccgggcccgatcgaggccggcggtcacgcgttgcgcgcgtcgttctgtgacgtgttttgtgcgcgatatcgcaagtgtgcagcaagcatgaaccgacggccctcgattagaaccttcggcgcataccccagcaccttgcatcataattcgtccaaatcgaccgtggcaagaaatataatgccggttgcgtaggcaacgattgtcgcaggcccgcgcttcctcccgacggccccggcgcacagtgcagcaggctttagtgatccggtaaaggacgcggaaaccacaggccggcaagcattcgcaggcttcatggtccggaaagcatcgccgggcgacgctgccgccaaaggggtgcgtcacatgctgaattacatcttcggcttcaatgcccgaatgggccggctggctttcttcttctgcagcttcgtgaccggcttcggcttcttgatgctggtctacggcatcaccggcaatgcaccggcgagcggcaggacggacgtgctgctggcgcaggccgcgaacagccccgccttgatcttttccttctatggcatgctcctgatctgcttcatgctgcaatcgatgcgcgtgcgtgacatcggatgggatccggtctgcgtgatggcggcatggatcgctctcatggtgctcgaccgggccattgccggacgatttcccgaatatgcgctgacctatcatcacaccgcaacggtggtcggcacgatcgccaacggcgtgatgaatctggtgctgacgttctggccgggcagcggccgtttcgatgaagcctcgccatcgccgcgcgagagcggcggcgacggcatgtttgaacgaaacagcgcaccggccgtcggcggcagccgcgtggcgcggattgccagcggcgaattcggcggcaagacgcggtagcggcgctctcttctcaccgtcgtcccggcgaaggccgggacccataaccactgccttgcgttgtcgcagcaagctggggccccagcatcgcaaaccaattgccattcgtggttatgtgtcccggatcgcgcttcgcttgtccgggacgacactgagtttgtggcgcggtcactgccttgcggcggctgagccgcggcgcgctcacccctcgtccaccgcccattcggcgccgtcgatcgcataggatgcgtggcggaaatccctgatgatcgcaaccttgtcggcggaccagtcgagcagcatgaacgatcgcggcggcgcatccagcgcgtccggctcgaacaccaggatcgcgggacggccctcgacctgtccggtcttgaggtgccagtcatcgatcttggcatagttgccgaaatagcgtgatacctcggccttgccgttcagccgcgtccggttgactagctcgagcctgatgtcatcggcgatcatggcgcggatggcgtcgaagtcgcgggcgttgaagcggctgacataggcgttcagcctggtgcgttcgccaggcgacaggcccggccgcggcgcatcgtcgggctcgcgggcgaacgcgcgcagttgcgtgcgtccacggtgcagcgccgccttcaccgccggcaggctgaaatccatgatgccgcagacctcctgcaaggaacagccgagcacatccatcaggatcacgctggagcgctgcgccaccggcagccgcatgaaggtgcgcaggctggccgccgcgatctcgcggcggccgacatcgtcgagctctccggccatcatgtccacctcctccgaagagtggagcgcgtcctggcggttgcgccgcctgaggaaatccagcgccgtgttgtgcgcgatccggaacagccaggcttgagggttctggatcggcgctgcggacgcgaagccctccatcgccttgatcagcgcatcctgcagcacatcctcgccgtcgatgacggatccgaccatgcgggcacagtagcgatgcagcctcggccgcatcgctgccagcagcgcgtcgacctcggtcggggccggcgcctggggtggtgacgtcatgacggctccgcggatctgttcatggcccatcggttcacggctcgtccagcatacgataattgccgacaatcacggcactgcgaaccagcggcggctcggcgcaacggtcgcggatgccgtcctggaaggcctggaacgcagccagcttcgggatcgggctcgagccgtcgtcggccgcagtctcgaccatatggatgaaggtgtcgtcctccagccgcagcgtcatgtagcgcacgtcgtccgggccggccgccttcagctcggcgaacacagccgcaaccagcgcggcattcttctccgccagctccggcttggtcttgtacctgatcagggtccgtcgcatcgcagcctccttggtttgcggcccgaaccggccgcgtcagacccaaggacgtttgcggaccgccaaaggatgcggcccggcaaaaataattgttggccgcatcctttgcccatcccggttcgtccttgccggcgaagcgcgccgcggccctgcggtacgccaacggagaaccaccatgcagacccctgaacagcgctgggcgctcggcctcaccgcgctggcatccttcatgatggcgctggacgccatgatcatgaccaccgccttcgccaccatccgtgcggatttcggcagcgccgtggagacgctgcaatggaccgtcaatgccttcaacctgaccttcgcggtgctgctgctgaccggtgccgcgctcggcgaccgtttcgggcggcgccggatgttcgccgccggaattggcctgttcgtcgcggcctcagttgcgtgtgcactggccggcaacgccgcctcgctggttgccgctcgcgccctgcagggcgccggtgcggcgctggtgatgccgctggcgatggcgatcctgagcggcgcgttcggccgcgaggagcgcgcccgcgcgctcggcatcttcagcggcatcaccggatgcgcgctgatcatcggtcctgcgatcggcggcttcatcaccgagcatctcggctggcgctggatcttctggatcaatttgccgatcggccttgccgctattgcactcgtgatcgcgcggctgcgtgagagcttcggaccgtcagcgccgctcgacatccccggactgacgctggtcgcactcgcggcgctggctttggtctggggcctgctgcgtggcaacagcgtcggatgggccagcgcggaagtggcgggcgccctgatcgccggcgtcgcgttggccgtgatgttcgtgctgtgggagctgcgcgcgacgagcccgatggtgccgatgcggctgttcgcggcaaggccattcgcgtccggcatggcggcgagcgtgctgttctatgccgcgatgtacggcgtgctgttcctgctgccgcagttcctgcaggtcgtgctcggcttcgatgccttcggcgccgggctgcgtctgttgccgtggacgactacgctgttcgtcacggcgccgatcgccggcgccgtggtcaaccggttcggcgagcgcacgctcgtggtcaccggcctcttgatgcaggcgatcgggctcggctggatcagcgagatcgtgagcccctctgtgccctactccgcgctgatcgcgccgctggtgctcgccggcgtcggtgtgtcgatggcgatgccggccgcgcagaacgcggtgctgggcgccgttgcggtcagcgagatgggcaaggcatcgggcatcttcaacatgggccgcttccttggcggcatgttcggcatcgcggcgatggtggcgagcttcgtcgcgaacggcgcgggagattcatccggacatttcagcaatggattcgctgcggcgatgagccttgcggcaatgctgtcattcgccggcgcgatcgcgggaatgttcctgccgatgcgacgtcaggtcatcgccgcggccgcgccgcaggatgcgtgagacctgccgcgattgggtttcgctatcgggcgatcaagcaattcgtattggaatggagctgcgaatgattacataatcaagcgacgaagccgttcgaaaccgagggcgacatcagatgacgcaagcaccggccaaacctcatcgcgtggtgatcgtcggcgccggcttcggcggactggaagccgccttcggtcttgcgggcgcgccggtcgaaatcacgctgatcgaccgccgcaaccaccatctgttccagccgctgctctaccaggtcgcgaccgcttcgctcgcgaccagcgagatcgcctggccgatccgctatctgctgcgcgatcgccccgaagtgaggacgctgttcgccaatgtctgcggcgtcgacgcggccgcgaaacaagtgcagctcgacgacggcggcagcattccctatgacacgctgatcctcgctacaggcgcgcggcatgcctatttcggccatgacgaatgggagccattcgcgcccggcctgaagacgctggaggacgccaccacgctcaggcggcgcatcctggtcgcgttcgagcgcgccgagcgcgagaccgatccggacgcgcgcgccgcgctgctgacctttgtcgtggtcggcgccggcccgaccggtgtcgagatggccggcaccatcgccgacctcgccaaggacacgctgccgcgcgacttccgccacatcgacacccgcatggcgcgcgtggtgctgatcgaggccggaccgcgtgtgctggccggcttccccgacgatctctccgcctatgctcagcgcgcgctggagagcctcggcgtcgaggtggtgctcggcgaagcggtcaccgaatgcgcggccgacggcgtgatctatggcggcaacaagctcgcggcacgcaccatcgtgtgggccgccggcgtccgcgcctcgcgcgccgccgaatggctgaacgcgcccgcggaccgcgcgcaccggctccaggtcgagcctgatctcaccgtgccgggtcatcccgacatcttcgccgtcggcgacaccgtcaccatcaagggaccggacggcaatccggtgcccggcatcgcgccggccgccaagcaggaaggacgctacgccgccgccctgatcaaggcgcggctcaagggcgagaccttgccgccgttccagtacaagcacgccggcagcctcgcgcagatcggcaagcggctggcggtgatcgatttcggcaagttcaagctgcgcggcgcgctcgcgtggtggatctggggcatcgcccacatctacttcctgatcggcctgcgcaaccgcctcagcgtcgcgctgagctggctctgggtccacgcccgcaaccagcgcgccgcacgactgatcacgcagggcagcagcaaggtcgcgcagtagacgtgctccgctcgcgcaatgctcggcgcggcttgtgcgccagggccgcgcatgaaatacttgccgcagcaacaataatgccctgggaggaaacgatgcggatcgatgcgcgcgtatgggcgcttgcggcttcgctggtcacgctgacgtcatgcggctcagtcgcgtccgcggcgcagatgaccggcgatcccgcggcgacctgcagcagccttgccggtccagccgacggtgccgtcaggatcgacaccgccacgctgcaggcgccgacacagctctcggtctccgacaaggcgccgacaccggccggccgcatcgtcccggccaatcccgccttctgcaagctgctcgggcatattgattctgtcgatcccaaggccccgccgatcaaattcgaggtgaatctgcccgtcgagtggaacggccgcgcgctgcaatatggcggcggcggcttcaacggcgtgctgatatcgggcctcggcctgccgccagcctatccgttcgacaaggcatcgccgctggcgctcggcttcgtcacggccggcaccgactccggccacgagcagaagcccggcgagccgccgcagctgttcgcgctcaacgacgaggcgttcgagaatttctcgcacaaggcctacaagaaggtgcgcgacgccgcgcgggcgctgacggtgcgcgcctacggcaagccgccggcgaagacgtatttcatgggatcgtccgagggcgggcgcgaggcgctgaccatggcgcagcgttacccggacgatttcgacggcatcttcgcgcgcgtgcccgtgatcaactgggtcggactgcaacatgccggcacccgctccggcctcgtgacgatgggcgacggctggatccggccggcgcaggtcaagctcgtggccgaggcggtgctcaaggcctgcgacaaacaggacggctcggacgacgccttggtgcaggatcccgtcggctgcaaggccgcgttcaagccggccacgctggcctgcactgcgggccagagcggcgacgactgcctgaccgagaagcaaatcgccgcgatcgagacgctgcattcgccgtacaaattcccgtttccgctcgccaacggcctcgacgactatccgggctggggcgtgtcgggcgaggacacgccggcgttcggcccgaccggcggctggaaggcctggtggctcggcaccactgcgccggcgcagccgcccgctccgaccaacggcatcgcctggatctacggtgccggcggcattcaatatgtcttcgcacgcgatccgaaactcgacgtcacgacctatcgccccgaagatcacaaggcacgcgtgcttgaagtgtccgcgctgatggattccaccgatccggatctcagccgcttccatgcgcgtggcggcaagctcgtgattctcgaacacatggccgactacgcgcaaagcccctatgccggcatccgctacttcgagactatcgagaagacgctcggcaaggacaaggtcgcggaattcgccaggctctacactgcccccggcgtcgaccatgtcggctccggcgcgcccgccaatatcgacatgctggccgtgctggtcgactgggtcgagaacggcaaagcgcccggcgatctcgaggtgcgcgagcagacaacggaagcgcccgccttcgacaccctccgctcgctgcccttgtgccgctggccggcatggccgcattacaagacgggaccggttactgaagcggcgagtttcgtctgcgcgccatgacgggaggccgcgtcaccccatcacctgatgcggtgagcggccgaacgcggccttcaaggcgcggctgaaatgcgagacatcgctgaagccgaagctcggcgcgacatcggtgacgccgccgaaccgccgttcggccagcgcctgataggcgccggcgaggcgctgctgccacagccagcggatcggcgtcgagccttcgcgcgcgaacaggcggttcagcatgcgcggcgagactcgcggcgaacgtctcacttcaccagcgggcagccgccatcggccagcggccggaacgcctgctcggccgggatggtcgcgatcagtctgtaatagtcgtaggggtatttcgactcctccggtttcttcacctcgaacagatacatcgggtggatgacgcgaccgtcctggcggatcgtggtgtcgccgaacaatttgtccttgcccttgaaggtcttcatctgcggcaccacgaccttggcatcgtcgctgccggtggcggcgaccgcattgagatacgctagcgtcgaagcatagacgccggcctggttgccgctcggcatcttgccgttcatgccgggacgcgcggcgaagcgtttggcgaatgcgcgggtgtcgtcgttcatgtcccagtaaaacgcctccagtagctgcaggccctgcgcgaccttcagacccatgccgtggacgtcgttcacgaacagcaggaacgccaccatggtctggccgccctgctggatgccgaactcggccgcctgcttcaccgcattgatggtgtcgccgccggcattggcgaggccgattacctttgctttcgaaccctgcgcctgcaacaggaaggatgcgaagtccgaggttccgagcggatgcttgctcgatcccagcaccttgccgccgtgcttctcgatgtaattcgtcgcctcggcctcaatgcccttgcccagcgcatagtcgaccgtgacaaaataccagtccttgccgccacgctgcatcatcgcggccgccgtggtgttgccggttgcccaggcgtcgttgacccattggatggtgttgggtgagcaggccttgccggtgagatcggaactcgcggtcgacgacgccaggaacgtcatcctgctgtcgcgcaggatggtgttgatggcgagcccgacggccgagttcggcacgtcgacgatggcatcgacgccctcgacatcgagccatttgcgcgcgatcgcggatccgacgtcggccttgttctggtgatcggcatagacgatctcgaccttgatgcccttgccgccgccgttgaaatcctccgccgccatccgcgcggcttccaccgagcccatgccgttggtgtcctggaagatgccggaaatatcgttcagcacgccgacccgcacgacattgtctgatatttccgcgcgtgcgctgcccgcggcgcaggccaatgccagcgtaaatccaatcccaaatcgcccaatcctaaagcccctcatcctgtcccctccctggcgttgttccgcagccggcatcaggccggcgtgatctcgaccggcagcgtctcgagcccgcgtagcgtgttgttgaacaggcgcttcggctcgcccgtgatttcgatcctggcaacacggcgcgccaatgccgccatcatcacctcgccttcgagacgggcgacgagttggccgacgcacatgtggatgcctgagccgtaaccgacatggcccgaggtgcggcgcgtgatgttgtaactgtcgggttcgtcccaacggcgcggatcacggttggccgcggcgaggaacatcagcaccttctcgccctcggggatattgacgccgctgagctcgatatcccgggtggtggtgcggaagaaggtctggaccggactttcgaaccgcacggcttcctcgaacgcattgcgcgccagcgttggatcaccgcgcagcttctcgaactggtcgggaaagcgcgccagacaatagacggcggcgccgatgccgttgacggtggtgtcgaggccggccgacagcagcgagcgcaccagcaggggcgcctcggtcgcggtaatggcgccactatcgacgtgggcatggatgcaggcgccgatgccgcccggggtcagattgtcgcgctggcactgctcggcgacataggcctgatgcggcgccgagcgctggatcgcctcctcgcggagctggttcggcggaccgaaggcgttgaacaccaggctggcataaggcagcagatgctcgcggccctccggcttaagaccgagcgcatccgggaagatcgacaacggataggcttccgcaaggtccgcgatcgcgtcgaaccggcgcttctccagcagcgcatcgacgcgagcctccgcggcctcggcaaatcgcccacgaagctgcttcatcacggtcgcagacagcaccgagctcagcacattgcgggttcgggtgtgggctggcggatcggcctccaggatcaggctcggcggccgccacggcttttccttggaaaagtcactgagaccgacgccgcggctggagcagaacgtggcgggatcgttcaggacggcgtacacctccgcgtagcgcgccacgccatagacattccacttgtccagataaaccaccggtccggcctcgcgcagccgctgatgggtcgggaacggatcggcgaagaaatcgagcgcgaacggatcgacgtccagatgcgggacggacgcatcgtctgttgcagtcatcgggacctcccgaggtttgatcttgtcaacacgggccgcatgtcacttgctcccgagcggtttcgcagcgatgatttgagaaatgagcagccagcccctcccccgaaagccccgccggccaagaccggccgatcccgcagacgccatcgatggcccgctgctggacctcaatcgctatgtgccggcgttcatcactttcatcggcaacaagctgtcgaacagcgccaccgcattttaccagaagaatttcggggtcaacgtcaccgagtggcggatcatctcgcagttggcgatcgagccggggattccggcctcgcggatctgccaggtgatcggcttcgacaagggcccggtcagccgcaacctcgcagcgctgcagaagcgcgggctgttgaccatccgcaccgcgccggacgacggccgcacccattcgatcacgctgaccgcgcgcggccgcgccatccacgacaaggtgatcgtcgcggcgctggagcgcgagcggcggctgctgtcgtgcctgagaaaggatgagcgcgaggtgctgatcgacctgctgcgccggctgcacgagaatctcggcgccgtgaccgggcaaagcacgagctgatggcgcagccggaccacggccggcgccctgcgccaccgcggtattcgtcagccctttcaaacgtggtgctcgcgcgctgctgcgcaacatgatcctcccaaatgcgaggccgttaaccggccctgtctctctgggtgcggaaactcgcacagcttagttgctatggcaactaaaaacgcgagcgcatgcgacgtcaggtctcatgccgagacttgtaacgtcgcctttgggtcaggtgagcacactgcccaggctccctccctccttgcgggggagggaacccttccgctggtgccttccttacatccgccttttctaccgcaatctcaccccgcgcagcccaccggctcggacgacccgtcgtcctccagcaccgcgaccgccgcagcgcggcgcgtcagcacggcgcgctggttgatgtagcccttgtcggtgatctcgccgccgtcgaccgaggctggctcggccagcagaagcgcgcgggtggcgtggccggaggaatggccgccttgcgccttcagccgcgccagtccctgcccgatcgcggcgcgaaccgacggatggccgatcgcctcccgcgtgtcggcgctctcgggcagtccggccagcgagcggcaggcggcaagattcggaaacaccaggaagcgaacgtggtcgcggccatggccggtgacgacaatgtcctgcgcgagcggcgccagcgccgcgatgccggcgacgcgcagagtgccgacgctgacccaggtaccggaattgagcttgaaatcctccgccacgcggccgtcgaagaacaggccgagatcgggccactcgggatcggcgaaggtgacggcgtcgccgatcttgtagaatccctcatcatcaaaggccgctgcggtcagatcgggcgccttccaatagcccggcgtgacattggggccgcgcacgcgaacctcgagcttgtcacccgagggcacaagcttcagctcggtaccgggaatcggcacgccgatattgccggagcgcttggcgaggaagtggcagtcggtcgccagtggcgaggtctcggtcgaaccccaggccgacaccatcggcagcctatggccgaccgcctgcaacgacagttcctccagcgcgtcccacagattctgcggcagtgccgcaccggcatagaaggcgaatttcgcaccctcgaagaacttgcggcgcaattcgtcgtcggtacgcagcgccgcgatcagcatgtcgaagccgcgcggcacgttgaaatagaccgtcggcaccacgctgcgcaggttggcgagcgacgtcgcaaacaggccgggcgccggcttgccgccgtcgatataaagcgtgccgccgttgcgcagcaccaggttgaaattgtggttggcgccgaaggtgtggctccagggcagccaatccaggatgacgagttcggcgcccggctgctccaggaacgtccaggtctgcgccttggcttgctggctcgaggtcagcatgcgctgggtgttgatcacggccttcggcgtgccggtcgagcctgaagtgaacaggaactttgcgatcgtgtccggcgtcactgcggcaaaggctttagccacatccggcgactccggcgtcgccgcgatggctgggaatgccagcgcgtcggcgtcctcgggattgccgctgacgatgacggcgcgatgcagcggcttgatcgcggcaagcgccgcggcgaacggctttgtgctcgcgacatagatcgcaccgggatcgagcagctcgatcgtgctcttcagcttgtcgaaatcccgggacatcaatgaataggccggcgagatcgccgccgatggcacgccgacatgctgggcggagagcgcaaacaatgcgtgatcgatgccgttgtcggagaggatgaccagcggccgttccgcgctcagcccctgtgacaggacccatgatgcggcctgacgcacgatgccgagcgcatcgcgatagctgacggtgctccagggcgtttcgacgctggcgcgttcgccgaggaagatgcgatccggcgcctgccgtgcccagtgctccagccagtcgccgatgcagcgggcgctttcctgcaagggcgtcgtagatcgaaccaggatgctgccgtcgccacgtcgatccgccacgatggcaggcgtcgcgaacaggctgttcggattgtctccgctgacggccgtcatggtttcctcctcgcccgtgtcttgtcgggatcgcgccgcaacaacgtgctgcgccgcgcccccgccgggctctttggcgataatgttgcggacatcaattgttgtcgtcaacaacaatctttccctctcgcctcaagcacgctagccttgcggccatggcaagcccgcaaaagacatcgcgcaaggccgcaggaacgagagcggcaatccgtcgcgcgcgcccggcgagtggccgggcgcacagtggcgacgccggcgatgatatcggcctcgacgcgctggtcggccacgccggctatgcggtgcgtcgcttccagctctggatcttccaggacttcatcaagacactggcaacggtcgatatccgtccgacccaatactcggtcatgaccgtgatcggggccaatccaggcctgagccagatggcggtcgccaagcggctcgggatcgagcgcgcgcggctggtgcatctgctcgacagcctggaagagcgcgacttcgtcagccgcatcccttccaccatcgaccgccgttcccatgcgctgcatttgaccacgcgcggcaaggcggcgctggcgcagttcaagcggctcgccgccgaacacgagcggcatgtcgccgagaagatcggcaaggcaaaccgcgagcaattgctacggatccttgcttgcttcacctgatccatcgatcggatttctgctcagccacgcctgcctgaaaaataggcgaatgcgctttcaagcaagctcgcctcagcgcgcggtggccattccaagcagctgatattgtgtaataatctgtcgcgcatctggcgcaggttaattgtacacaatggcacattgcttgcttcgatcaggcggcaattccttcgcggcgaccttccgaaggccaccgctcccaaagacgaggccaaccacgtgactgaaactgtcgccgcgatcgttgccgcacaccgcaccaggaccatgacgccggcgcaaaccgtggcgcgcagctaccagcgcatccgcgaacacaacgatcccgccatcttcatcagcctgcgcgacgagcaggaggcactcgccgaggccgcgcagctcgccgatccgacgctgccgctctatggcgtgccggtcgccgtgaaggacaatatcgacgtcgcgggcttgccgaccaccgccgcctgcccggccttcgcgtacacgccagcgcacgacgcgaccgcagtcgcaagactgcgcgcggcaggcgccatcatcatcggcaagaccaacctcgaccagttcgccaccggcctggtcggcgtgcgctcgccctacggcattcccaaaaatccagttcgcgacgatctcgtgccgggtggatcgagctcgggctccgcggtcgcggtatccgcgggcctggtgccgctgtcgctcggcaccgacaccgcgggcagcggccgggtgccggccatgctcaacaacgtcgtcgggctcaagccgagcctcgggctgatcccgaataccgggctggtgccggcctgccgcacgctcgactgcatctcggtgttctcgctcaccgtcgacgacgcgctggccgcgcttgccgtgatggcaggtcccgacgacgctgatccgttctcgcgcgaccggccgctggccgccctcgcagcgtttccctccaggctgaagctcggcattcccaagtcgggtcagttgatcttcttcggtgatcgcgaggccgagacggcctatggcaaggcattgcagcgctggcaggtgcttggcgccgatctcgtcgaattcgacctcgagccgttctacgagaccgcgcggctgctctacgagggcccgtgggtcgccgagcgctatctcgtgatccgcgacctcctggcatcgtcacccgacgcgatccatcccgtgacgcgcgagatcaccatcggcggcgcgcggccgaccgcggccgatactttctccgcgctctatcgcctgcaagcgctgcgccgcgttgccgagcgcagcttcgcgcaactcgacgcgatcgtgctgccgacggcgccgacggtctattccaccgccgacgtgctggccaagccgatcgagctcaactcgcggctcggcacctacaccaatttcgtcaacctgctagatctctgcggcctggcgctgccggcggcgatacggcccgacggtgcgccattcggcatcacgctgctggcacctgccggccgcgacgccgagcttgccggcatcggccgggtattccatgccgacaccggacttggccttggcgcaaaatcgctgccgcagcccgcgctcgctcaagtgccggcgcaagcgacatccaacgagatcaccatcgcggtggtcggcgcgcatctctccggcatggcgctgaaccacgaattgaccgcgctcgatgcgcgcctgctggaggagaccgccaccgcaacggactacaagctctatgcgctcgacaccacgccgccgaagcccggcatgctgcgcatcgagacgggtgcgggtcatgcgatcaagctcgagctctgggcgatgtcacctgccgcgttcggaagattcgttgccgcgatcccgccgccgctgtcgatcggcacgatccggcttgccgacgggcggcaggccaaaggcttcatcgtcgagccggccgcgattcatggcgcgaaagatatttcggcctttggcggctggcgggcgttcatggcggagaaggcgaaaggttagccgccccttccgccattccggggcgcgcctcttggcgcgagcccggaatccatttcgcctcagcgaccgttgccggaagcggcccgcaaccaatcatctacgtcagatgccgatgaatggattccgggctcgcgcttcgcgcgccccggaatgacggtgagagctacaccgacaccgcgtaggtctcatattccccgcgcacctgctcgatatgggcgcgcatcgcagccgcagcgcccggcttgtcgccgcgcatgatggcgaccacgacgcgatcatgttcggcgtgggattttgcaaggcgcccgaggttacggaactgggcgcggcggaacggctgcacccgcacccgcgtcgccaaggtgatctcggcgatataggcgttctgcgagccggtatagatcgcattgtgaaagcgctcattgacctcgtggaagcgctcgggattgccggtgtagctcagcacccgcagctcctcgtggatcgcctccagcgcgtgacgctccgccggcgtcatgcgttccgcggcaaggccggcgcacatcgcctccagctcggccatcgcctcgaacatgccggtgagccgctccagcgagggccgcgccaccaccgcgccgcgatgcgcacgggcgtcgatcaggccgctggcggccagctgccgcagcgcctcgcgcaccggcgtccgcgagacgttgaagcggcgcgcaaggtcggtctcgtcgagtccggcccccggcggcagcgtgccgcgcacgatctcgtcggcgagttgcaggcgcagctcttcggcgcgcgtgaccttgtcgaccagcgacgacgggcgatcgacgcgcggcacgaccggctcggattcagtcggctgcggcgcgcgggtcggaagatcgtccaggctcatggttcaagcgctcttgttcaaacgcctttgggctcgtcgatgacgctgacatgggccgcgacgattctccagccctcggggaagcgaatccacgtctgcatctgccgtcccaccctgcccggagcgctgtcccgatagaacagcgtcgaggcgatcgcggtgtcgcggccataggtcgtgatcacggtgcggtcgatcctgcgcatcagcccggccgccggccgcccggcgcggaacgccgcgatctcgccgtagccgtaaaggttctcgccgatgccatagcgcagcgtgcggctgtcgttgcggaacagttcgccgagcaccgcgacatcgttcgacaccagcgccgtttcgtagcgctggaactgcgcggtgacctcggcgaccacgtcgggaagatcgatgtccatagtcaaagtcctctcggcgcaggcgcgttcgcaacgcccatctgttccagcgcgtaggcgacccgcagcgcgatgtcctcgcgccagggcgcggcaataatctgaacgccgatcggcatcggttcaagcggcaccggcacggcgaccaccggcaggccgatgaaggagatcggctgggtatggattccgatattgggacgcaccggaagctcgaccccatcgagcgtgaagttggcctgaccgatcttcggcgcgatgcacggcgttgccggcgccaggatcacgtcgaccgactggaacagctccagcaccctggcgcgataccagcggcggaatttctgcgccttgtcgacatggacggccgggatcatcgcgcccgagaacaggcgatcgcgcactgccggatcgaaatcgttcggacgggtgcgcagcctgtcgagatgcagcgcggcgccctcggtcgtggtgatgatgaaggccgcggcacgggcacgcgccgcttccggcacctccacgacctgcgtcgcgccgagtgcctttgcgatgcgcgcgaccgcctcgaccgcctccggcaacagattctgctggaaatagccgccggcgatcgcgacccgcagcccgccgattccttcggccagcagcggcatcgtgggctcgagcggtcgcgcgacgcaggcgggatcatcagtttcgggcccctgcatgacgtcgtaggcgagggcgagatccgtcacactgcgcgcaaacgggccgagatgatcgaggcttgcgacgaacggaaacgatcgcgcgcgcgacagccggccgtaggtcggcttcaggccgaagatgccgcagaacgatgacggcacccggatcgagccgttggtatcggagccgagcgcgatcggcaccagcgcaccgccgacggaactgccggagccgcccgaggagccgccggccatccgcgccggatcgtgcggattgcgcgacggaccgtcatgcgcattctcgccggtgaagtcgtaggcgtactcgcccatgttgagcgcgccgaccagcacggcgccggcggcttccatccgctcgatcagcgtggcatcgcgcggcgaggccggcaggtcgcgattgatcttcgagccggcgcgggtcgagaggccctgcacgtcaaacaaattcttcaccgcgaacggtacgccggcgagcgggccggccggctgacccgccgcgatcgcggcgtcgatggccctggctttggcgcgcgcgcgatcggcggtgacgtcggtgaaggcgttgaggaccttgtcgtgctgcgcaatgcgcgcgagcgccgcctcggtcgcggcgaaggccgtcatcttgcggtgtgagacggcctgcgcgatttcggcggccgacaggagagcaggaatgtcggacatcgcgatctcagaccgaatagatcgcagccgatgcggcgtcatcgggcagcgggaagtcatcgaccagtttcgccagccgcagcgcgacctcaagattggcgcgcaccgcgggacgccaggcatcttccagcggcagctccagcgcgcgggcggcagcattcacgtagtcgtcgaggtgatcggccatttcgctcccagtgagtcttcaagcaaccggcaacggcggatgcgggatcgccgtcagcagttcccttgtataggcatcctgcggattgcccaagacggcttctgacgtgccctgctcgacgatgcggccggcccgcatcacgatgacgcgatcgcacagcaggcgcaccacgttgagatcgtgcgacacgaacagatagctcatgcccatcgactgcttgaggtcctgcagcagattgagcacgacggcctgcacggacacatcgagcgccgcggtcggctcgtcgaggatcacgagcttcgggtgcagcgcgatggcgcgtgcgatgccgacgcgggccttctggccgccggacagctgatgcggaaagcgatccagcagattgaccggcaggccgaccagccgtgccagttcctcgcagcggtcgcgcagcgcggcgcgccccctgacgtcgccgagctgcatgatcgggtccgcgatcgcgcgcgccgcggtgaagcgcggattgaggctgtcggtcggatcctggaacaccatctggatctggctgcgccgcggcagccgcgcgaaggattgcggcacgatgccgccgatgtcctcgccgtcgaacatgatgcggccggaggtctggtccaatagccgcatcaccatcatcgaggtcgtcgacttgccgcagccggactcgccgaccagcccgacgctctcgccatggccgacctcgaaactgatgccgtcgacggcgcggaatacgtcttcctcgaccggcggcttgcggccgaacagttttgtcagcaccgagcccgcgccctggcgagggtattccttgacgagcttttcgacggacaggaggggctgcacctgctccctctccccgcgtgcggggaaagggttggggtgaggggggctctccgcgagcacagcttgtggagagtccccctcacccgccgcgctgcgcgcgtcggcctctccccgcacgcggggagaggcgaaagcagtcgcttcctcttcaggcaacaaatccctcagcgacacgccgagccgcggcgtcgcgcgcatcagcttcttcgtataatcgtgctggggcgcggcgaagatgtcggccgactttgcggtctcgaccacacggcccttctccatcaccacgacgcggtcgcaataggcggcggcgaggccaagatcgtgggtgatcaggatcgtcgacatcgaccggcgcctcgtcagctcgacgatcagatccatcaccgccttctgggtggtgacgtcgaggccggtggtcggctcgtcggcgatcagaagctgcgggttacaggccagcgccagcgcgatgacgacgcgctggcacatgccgcctgacagttcgaacggataggcgtgataacgctcgcgcggccgcgcgatcttgacttgctccagcgcctcgatcgcggtctcgccgcggtcggtgacctgggcctgctgcacatgctggcgcagcacatcctcgatctggtgcccgaccttgcggatcggattgagcgcggcgcgcgggttctggaagatcatcgagacttcgcggccgcgcagatcgcgcatctggctctcggtcgccgccttgacgtcgatgccggagaacatcaccgagccctcggcgatccggcccgcacgatcgaggatgcgcatcacggcgtaagatgtcaccgacttgccggagccggactcgccgacgatgccgacggtctcgcccttgccgaccgagatgttgacgtgctgcacggctttcacgatgccgcgacgcgtggtgaactcgacggtcaggtcgctgacgtcgagcagtggctgcgcagtcatgcgcgcctcccacaaaatatcgaaaacaaccccatgcaaagcagtgttacggtagcatgacaccgcggcgacacagtcatcacgtcctccgctgcgggtcgacgatgtcgcgcaggccgtcgccgagcaggttgaagcagaacaccgcgatcatcagcgccaggcccgggaatagcgcgatccaccattcgccggacaccatgaagcccgcgccctcggcgaccatgatgccccactccgcggtcggcgggcggacaccgagaccgatgaaagagagccccgcggcgttgaggatcgcatagcccatggtcagcgacatctgcacgatcatgatcggcatgatgttgggcaggatgtgcccgagcaggatgcggtattcgccattgccggacagccgcgccgcctgcacgaagccggcgttgcggcggacattggcttccgcgcgtgcgacgcgggcatagagcgggaagttcacgatcgcggtcgcgatgatgatgttctgcacggtgttgccgagcgccgcgacgatgcccatcgccagcacgaacagcggaaacgccatgatggtgtcggcgatgcggccgacgatgcggtcggtccagccgccgaaatagccggcggcgatgccggcgagcccgcccatcaggaacaccagcacgacggaagcgaccgcgatgaaggtgtcgagcctcgttgcgacgatgacgcggctgaagatgtcgcggccgagctggtcggtgccgaaccagtgcgccgcggacggcggcttcaatgccgccgcagtgttcgaggcgagcggatcatacggcaccacatagggcccgaacaacgcagcgaacaggatcaggatcagcagcgcgaaggcgaagccggtgaccttgttctcgctcagcacatagcgggtctgctcgaacactgcggcaagcccggaggttcgggcgggacccgcgggttcgacggtcggcgcaacggtgctcatgtgcccctcctacccttccagcctgacgcgcggatcgatcacgccgtagaggatgtcgatcagcagattgagagcgacgtacatcaccgccatggtcagcacgaagccctggacgggcgcgaagtcggatgcgatcagcgcctccaccgcataggagccgatgccgggccaggcgaacactttctcgaccagcacgttggccccgagcaggaaagagaacaccatgctgagcgtggtgatgaccggcagcatcgcgttgcggaacgcgtaggtcacgatcaccttgccgggcgacaggccgctggcgcgcgcggtgcggacgaaatccgacgccagcaccgccagcatcgaggcgcgcgtcatgcgcgcgatcggcgccagcgagaagatcgcgagcgtcaccgccggcaggatcaattggctgaacgccgaacgaaacgcctcgaagtcgcgcgcgatcagcgtatcgatcagatagaagccggtgacggtcggcggcgcgctgtagaacacgtcgagccggccgagcggcgccggtgcccagccgagccggaaatagaacacatagaccagcacgagcccggtgaagaacaccggcagcgacacgccggccgtcgtcgtgacgcggcagagatggtcgatccacgagcccggccgcgtcgccgccagcacgccgagcgggatcgcgatcacgatcgagacgacgaggccgagcagtgtgagttcggccgatgccggcaggcggctgcgcagctcggcggcgaccggctggcccgtggtcagcgaggtgccgagatcgccatgggcgagatcattggtgtagcgcacgaactgctcgatcagcggcttgtcgaaaccgagcttcttcctgatctggtcgaccgcttccttcgttgcggcaggccccgcgaaatacgccgcgggatcgccgggcagcgcgcgcgtcagcaggaacgtcacgatcacgaccccgatcagcgacgggatcgcgaacagcagccgcttgccgatcagggtcagcatgaggcgctcccaacggcatcatgcaaagccacaacgggactggcagggctccctccccccttgcgggcagggcaatcgtctatgaagcgttcggtgtcgtcccggcgtaggccgggacccataacccaagggagcggttgcggcgcgggcgagtgaccacgagtcttcgtcaaactaaatcctgtggttatgggtcccggatctgcgctccgcttcgctgcgcttgtccgggacgacgaagttcttttgccatatgcgaatgccctcccccgcaaggggggagggagcctgagaggtgtgctcacctcacatccatacgcgagcgtattgcggagggagcgcagcatcaccgcctcaccccttcgccatcgcgcgataatccagccggcggtggaaccagtattggtagcccgagatgttcttctgcatcgcgacgttgacgaacggctggtagagcgggatgcgcgggatgtcggtaaacgcgagatcgacgaagcccttgacgtcggcatcgtaggccgcggtgtcgccattggcggccgcgatgcgcgcgccgtcgatgagcttgtccatctcgcccgacttgtagctcatcgtgttgaagatcgaattgttgccgtgatagcaccagtagaagaagtactcggggtaatcgagccagcccgagaacacgttggtgaacagcggcatctccttcttggtgagctcagtgcgccagttggcgccgggcaccttgttgatcgtggtcttgatgccgagctgcgcgaggctctcctgcaccagcacgcagagcggctcgttgaccccggcaaaattcaggtcgaacgagatcgtggtctcgaaaccgttggcgtagccggcttccgcgagcagcgccttggccttctccatgtcggtgacatacttggtcggctgcggccaggcgacctcggtcggcttgtccttcggtgcgccgaacatcgggttggcgaggccgaacagcaccgcgtccatgattttttggtacggcatcgcataggccatcgcctgccgcaccttgggattgtcgaacggcggcttggtgacattcatgccgatgtactggatgccgttggagaacggcagcgagaccacgttgagcttgccgttcgccttcatctcctggaaatccttgaacggcagttcgtaggagatatcggcatcgccgcgctcgagcagcgcacggcggttgccggcctgcggcaccatgcgccagatcacgcgcctgatcttcggcaggggacccgagacccagtcgtcattgcgctccatgacgacttcggtgccggcggtccatttggtcaccttgtaggcgccggagcccgcggtctgctgcttggtgaattcgagaccccaggggtccttctcgctggcgttcttcttgacgagctccgagttgacgacgcagggcacgatcacggcgaggtcggggatcgtcagtcggtcctttttcaggaagtcgacgcgcaccgtgtggtcgtcgacgacgacgaactgctcgggcttggtcagcgagcccgcgctcatctggaaggtcgggaagccgccgacgctgacggcacggtcgagcgaccatttgacgtccttcgccgtgaccggcgtaccgtcatggaatttggcgttcttgcgcagcttgaaggtcgccgacatgtcgccgatgttgaaatcctcggcgagctcgggcttgaacttgtcgcggtcgtaatagggcacgtcgccaggaccgctcttcatctcgtggctgatcagccggtcgtagcaattccacgacacctcatagccgggcacgttggtgccgatgccgtggatatcgagattgttggggccgccttcggaaacgatcagcagcgtctcggagcgcgcgtcggccttggccggcgaccagatcgcgggcgcggtcggcgccagcgcccccgctgccaatccagagaccgatttaaggaaatcgcgacgcttcatgggatgctccaacgcccggaaccgggccctggaactcagttcgcaaggattgtgccaacccttaacgaaagcttatgaacggctaatgcgctggaaagacgaagagaagcgctaaaggtaccttggtcaggcgcctaattgcacgcgcctcgttgcatacaaaggaaggccatttgctcaataaatgagcatcgaccgagcgatgctcgatttatcgccggcgatcgatatcaccacgacaagagctagcccggccagatcagttcctgcaactgcacgaaatcatccacctggtccggccagcccgcgatgcagatgtggcggagcggatcgctggccgagtgcagcatcatcagcgccatcagccggcgcttcagcgtgaaattcacctcgctctgcgggatgccgaagccgtcgaacaggctgcgcacaaggcgcggatgcccggcggccatgaaggcgctcggaccgagcagatcgtactcgccccacccggtgcggacgtcgccgaagtcgaacaggcccgcgacatgccagccgtcggcccggcgcccgagcaggaaattctccggaatgtactcgccggtcaggatcaccggcggcgcgtgcatcgggatcaactcggtggcgtcgcggaggagatcatcgagtgagcggaggaatttcgccggcaggccgagccgttcgtgccgtgcccggcactgcgcgacctggccgcgcatgaaggcgtcccagggttggccgatcgccggcaggccgccgggcggcacccgctgcacttcggcaatcacggcgccgatctcgccgagcacccgctcccgctcggcttccgacagcgacggccacacctccgaaccgaccgtgccggcaaggcgcgtgatgacgagatagggccagccgtcgcgctcgccctccgcgatcagatcggggatcggaatgccgagccgtccgcgcaattccgccagcgcgccgcgttcggagacgaattgcgggcgcaggaacggcgggaacagtttcaggatcaggtcatcgccgagcccgacaacgaggttggtgccggtcgagaacacatgcggcgtgccccatgatagcccgtggccatcggcaatatcgcgcgcaaccggcagccagcgcgacgcgtcgccgcgccaagcgcggtagctgtcgtaggtggtgaggggtgggagatgcattttcagccggcattctgagacgatgcaatcacggcacaatctctcctctcgtcgtcccggcgaaagccgggatccataaccacagggttgagttgttgaaaaagttgtggccgcagcgccgcgcaacaatggccttcggtggttatgggtcccggccttcgccgggacgacatcgagtatgttgcgccatcgcgagtcacatattcgcagtctctcggagaagcggctgagcgcctcgaggcgcccatcaccggtccggattggcgcgttcgaactggcgcagcaggcggttgccgcgttcgacggcgttgtccatcgcggcctgtgccgagcgcttgccggcgaacacctgttcgagctcctcctcgatcacgtcgcggaccagcacgaacgagccgagacggacccccctggacttgtcggtcggcggcttcagcgtgacctcctcgatcgagatcgaggcgccgggattgcgatcgtagaagccctgcgtgcgggtgagatcgaacgcggcacgggtgatcggcaaatagcccgtgttctggtgccaggcggcctgcacctccggccgcgacaaataggcgaagaacttcgcaacgccggcatattcggcgcgcggccggtcgcgcagcacccacaaggtcgcgccaccgatgatcgagttctgcggcgcgccctgcacgtcggcctcgtacggcatcatgccgtagccgacctcgaatttcgaattggccttgatatcggcgcgggtacccgacgagccgatgaagatgccgcactcgcccttttggaagcgcggctcggccgcctgcccgcggccgctatagtcgaacgacttgtcggtctgccactgcgcgagctgcgcgatatgacgcaccacgatcgggttgttgaagaccagctgcgcgtcgagcccggcaaagccgttggacctggtcgcgatcggcaaattgtggaaggcggagaaattctcgacattgatccaggacggccaagacgtggtgacgccgcacatcgcgccggccgcccgcagccgtttcgccatcgtaccgagctcggcccaggtcttcggcggctggctcggatcgagcccggcggagcggaacatatccttgttgtagtagaggatcggcgtcgaggcgttgaacgggaacgacagcatgttgccgtcgacgtcggcataatagccggccaccgcgggcaaataggcctgtggtgcgaacacctccgactgatcgcgcatcagctcgaacaccggatagatcgcgccgcgcgccgccatcatggttgcggtggcgatctcgttgacctgaacgatcgccggctggctgcgcgagcggaaggcgaagatggccgcagtgacggtctcggtgtagttgcccttgtaagccggcacgatccggtagtcggattgcgaggcgttgaagtcggcagcgagcttctcgagctgcttgccgagttcgcccgacatcgcgtgccaccacatgatctcggtcgccgcttgcgccggtaccacaagcagcagggtcgcgacagcgagatgcaagagcttcaaggcgcgcttcaaggcgagcttcacgacgagtcgttccccgatgccaacacgccgtcatacggcgctacaaccgcagattcaatcgacaccgcaggttgtagcgcgatttaacgtttagccgatgggcgaaccatcgccattctgctaaaaaccgttgaaccttttgctcccgccctggacacaaatcacaaggggaattgtcgccagtgtaccgccgcgccggcctttcgcggacaataacgcttgccgtcgcgctgttgtgcacagcggtctcggtgagtgcttttgcacgcgaattccgcaccgccgatacccagaatgaggactatccgaccgtccaggcgctgaactacatggaccgcctgatcgcggaacgcaccggcggccggcaccgcatcgtggtctttcattcccgccagctcggcgaggaaaaggagacgctggaacagactcgggtcggcgccatcgatctgaaccggaccaatgtggcgctgatcgggaccatggtgccttccgtgaacgtactggcgatgccgttcctgtttcgatcgcttgagcacctgcaacatgtgctggacgggccgatcggcaacgagatcctcggcagtctggaggcccacggcttcgtcggcctgaccttctacgattccggcgcccgctcgatctataacagcgtccgcccggtgcgttcgctggacgacctcaagggcctgcggctgcgcgtccagcaatccgaacagatgtcggacatgatccgcgcgctcggcgcccagccggtcgagatgccctacggccaggtgctgaccgggcttgccaaccggctgatcgacggcgccgagaacaactggccgtccttcgtcaccaccggccactacaaatacgccggctactacatcttgacccagcacaccgtgagccccgaagtgctgatcatgtcgcgcaaggcctgggccagcctctcgccggatgagcaggtcatcttccgtgacgcggcgcaacgctccagcatctatatgcgcgagaagtggcgggagctcgaggagcgctcgcgcaagcaggcggagctcgcgggcgtcaaggtcgtgaccgacttcgaccgcaagccgttcgaggcggcgatggccggcatctatgccaaggccgaacgcgatccggcgatcgcagcgctgatcgaacgcatccgcaacgtggagtgaccggatcttggacgcaccccaacaggacgggacgatgcgacggcgggcggccttcgggccacagggccgcttccgcatcgtccagttgctgcgtgcggtgccgatccgctggcgcatcctttcgatcgcgctgctcaattcggcggtcgtgatcgtgctcgcggtgctgatctggaacggctcgaaggtgctcggctcggcctgggaggatgtccgccaggtgcgggaatccgacaagatcctggccaagctcgaaagcgagaccagccggctgcagaacctgatccatcgctacatcaaccagccgagcccggacctgttcgcggaaatcctgctgctccgcgaggccgtgctcggcaccttgaccaaccgggcctcgaccgacccgatgctgtcgggctcggtcgagcagctcgaacgcgccaccagccgcttcctcgacggcttcggcgaattgcgcaccttgcagaccaagatctccaagacctatgacgagcaggtgctgacgccgaccaaggacatggccgggctgtattcgatcatcgagggcgccaccggccatcgcgacgcgctgatctggccggcgctcggcaagtcgcgcgaggccttcacctcgctgctggtcgccgccaacgcctactacctctcgctggcctcctcgtcggccgaggaagcccgccgcaacatcgatacgatcgagaagacgatcccggtcatgaccgatctggccgagaacgatctgcagcgcatggcgctgggccggctcaaggtcaagaccgccgagctgcgcgacggcctcggccagctcagcgagcagctcaccaaccgcaccgacctgctgcgcaactcgatcgacgccagccaggccgacgcgatcggcgcgatcgacgatctctcggtgaagatgcgccagcgcgagcagaaggcgcaggggaccttcgacaagacgctgacgtcgatctcgcgccgggtgctgtcgatcgcggtgatcttcctcggcatcatcatgtccgccggcgtgatgatcgcattgtcgatccggctgccgctggcgcagatcatggccgcgatgcgcaacatcacctctggcgatctcgaccggccggtacagggcacgacggccaaggacgaggtcggcgccatggcgcgtgccgtcgaggtgttccgcgaaaatgcgatcgccaagcgcaagaccgaggacgagctgcgcgccgccaaggagaaggccgagagcgcgctgctcgagctcaacgccgcgcagcagaacctgatcgatgccgaacgtctcgccgcgctcggcggcctggtcgccggcgtcgcccacgaggtcaacaacccgatcggcatcagcctgacggtggcctcgagctttgcccgccgcagcgagatcttcgagagcgaccttcggaccgagccgctgcgccgctctaagctcgacgaattcgtgcgcgcctcacgtgacgcatcgcagcagctggtcgcgaacctgcaacgcgccggcgagctgatccagtcgttcaagcaggtcgcggtcgaccgctcgcatgccgagcgccgccagtttgccttgagtgaagcgaccgaccagatcgtggcgagcctgcggccggtgctgaagaaggcggcgatcgcactgtcggtcgacgtgcccgagggattgctgatcgacggctatcccggcgcctatgggcagatcttaaccaatcttttcctcaacgccgtcaatcatgccttcgccgacggccgctccggcaacatcacgatctcggcgcgcgggcgcggcgccgacgatgtcgagatcatcttcgctgacgacggggccggcatgacgccggacgtgcagcggcaggcgttcgacccgttctttacgacccgccgcaacgaaggtggtacgggcctcggcctccacatcgtctataacctcgtcacccagcagctcggtggacgcatgatgctggagtcaagggtaggacaaggcaccacttttcgcattatcatgcccaggatcgccaagggggctgccatgggggctgccgagggcgagcccacgatcactgacgcagcagccgacggaaccagtcaatggccgaacaggacgatgtcctccaactgatcgacgacaccgagagccccccggaggactcgccggtacggaaatggaagatcgccgtgatcgacgacgatcacgccgttcatgagggcacccgtttcgcgctgagcgactacaatctgaacggcgcaacgctggagatcctgtcggcctactctgcggccgaaggccgcacgctgatgcgggacaatcccgacatcgcggccgtgctgctcgacgtcatcatggagaccgacgtcgccggcctcgagctcgtcgaatacatccgcaacgagatcaagaacgagaccgtccgcatcatcctgcgcaccggccagcccggccaggcgccggaacggcgcgtcatcgtgcagtacgacatcaacgactacaaagcgaagaccgagctcaccgccgacaagctgttcacctcgctgaccgcggcgctgcgcagctatcagcagctcgagcgcatggtgcagaccaggcgcgggctcgagatcatcatcgacgccgcctcgacgctgtacgatttcaagtcgatgcagcggctggccgagggcgtgctgacccagctcgcctcgctgctcaatgtcgattgcgccggcattctggtgctgcgcgacgacggcaacgccgccgcatgcgatttctcggtgctggcctgctcgggctgctacagccgcttcatcggcaccacgtcatcgagagcgctcgacgccgacctcaggcacatggtggaagaggccttccagcgccgaaagaacgagttcgccgaccatcgcagcgtgctctattcgcgcaccggctctggccgcgaggtcgtggtgttgctgcaggccgagcgccagctctccgacaccgaccgcgcgctggtcgaaatcttctcgagccggctctcgatcgcgttcgacaacgtgatcctctaccagcagctgcacgaggccaacacccagctcgaggaccgcgtcgcgcagcgcacccgcgcgctgatgcaggccaaccggcggctgtcggcgcaatggctgcggctgcagcgcgccaacggcttcaagaacgagatcctcggcaccgtcgcccacgatttgaagaatccgctcggcgtgatcctcggccgaaccgagatgctgaccgaattgatcggcgccggctcgccgaaggaaaacgtcaccgcgcaggtcgagcacatccgcgatgcgaccaagcggctgacctcgatggtcgaccacctgatctcggatgcgatggccgacgcgttcgacatcacgatccgccgcgagccggtcgatgtcgcagccctggtcaacgaggttaccgaggccaatctgccctcggccgtcaacaagcagcagagcatttcggtctcggggccgcagcacttcgtcacgatgtgcgacgccgaccggatccgcgaggcgatcgacaacctggtcagcaacgccatcaaatattcgccgataggcggcaagatcacggtcgcggtcagccacgagggcgaagacaccgtgatccggatctccgaccaggggcccggcctcagcccggaggatctcggccggctgttcggccggttccagcggctgtcggccaagccgaccgcgggcgagagttcgaccggcctcggcctttccatcgtcaagcgcatcatcgacatgcatggcggccatgtgaccgcccagagcccgggccccggacaggggtcgacctttacggttacactcccggcgacagagacatgaaccagaacccgcatatcttcatcgtcgacgacgaggcgccggcccgcgagatggtcggcgattacctcaagatgcacggcttcggcgtgacgctgtgcgatggcggcaagagcctgcgcaaggagatcgagagcagcacgcccgatctcgtggtgctggacctcaacatgcccgaggaagacgggctgtcgatcattcgcgacctcaagagcaagatcaacgtccccgtcatcatgctgacagctactgccagcccgatcgaccgggtggtcgggctcgagatcggagccgacgattacgtggccaaaccctgcgagctgcgagagctgatggcgcgcatccgctcggtgctgcgccggagcgggccggccaagtctgccgcgccggaaccggcgagcgcgaaggccgagaaggagcaattggtgcggttcggcaccaaatggctcgatctcgaggcccaggcgctacgcgacgacgaaggcaacgagcatccgctgaccgcctccgaattcggcctgctgaaggtgttcgcggccaatccgaagcgggtcttgtcgcgcgagcggctgctggaactcgccaatgcccgcgatgcggaagccttcgaccgcgccgtcgacctgcgcatcatgcgcatccgccgcaagatcgagttcgatccgaccaagccatcggtgatccgcaccatccgcggcggcggctacctgttctcgccgaccggggacaaggcgtagcgtcgcgaaaattatcccgcctctcaatgtcgtcctggccttcgccaggacgacaaatcgttgtgtggcaagagcgaattcatcgacacaaaggctgtcaatccgcgcaaaaatccctaagtttcggccatgccgaaaacagcctccaaagaccccgcgaagcccaccccgaacaccgccccgaagcccgtcgccgccaaaccggttgcaagcagggcggcggcgaagggcgaccatatctttctggtcgacggctcgggctacatcttccgcgcctatcacgcgctgccgccgctcaaccgcaagtccgacgggctgcaggtcaacgccgtgctcggcttctgcaacatgctgtggaagctgctgcgcgacatgcccgaggacaaccggccgacccatctggcgatcatcttcgacaagtcggagatcacgttccgcaacaagctctatccggactacaaggcgcaccggccgccggcgccggacgatctgatcccgcaattcgcgctgatccgcgaagcggtgcgcgccttcgacctgccctgcctcgagcaggccggcttcgaggccgacgatctgatcgcgacctatgcgcggctcgcgaccgaacgcggcgcgaccacgaccatcgtctcgtcagacaaggacctgatgcagctcgtcaccgacaaggtcgtgatgtacgacacgatgaaggatcgccgcatcggcatcccggaggtgatcgagaaattcggtgtgccgccggagaaggtggtcgaggtgcaggcgctggccggcgattccaccgacaacgtgcccggcgtgcccggcatcggcatcaagaccgcagcgcagctgatcatcgagtatggcgatctcgatcagctgctgttccgagccaccgagatcaagcagccgaagcggcgcgaggcgctgctcgagaatgccgagaaggcgcggatctcgcgccagctggtgctgctcgacgacaaggtcgacctcgaggtgccgctcgacgacctcgcagtgcatgagccggactcgcgccggctgatcgccttcctcaaggcgatggagttcaccaccctcacccgtcgcgtcgccgactatgcgcagatcgatcccgccaatgtcgacgccgacgcgagcaacaagagcggcgcgagcacgaaatccgctgcggccgacgggcctgccaaggcggccggctcgtccggcgatctctttgcaagccccgccccgactgcaaagagtggcagcaagggcgacaagtcctcgagtttcaagggcacgccggccgcgctgaccgaggcgcatgcggacgcgatgcggaagctgccgttcgatcgcagcaagtaccagacgatccgcagcatcgaggcgctgcaggcctggatcgcccgcgtgcccgacgtcggtcatttcgcgatcgaggtgatgagcgaccagattgatccgatgcaggcggagatttccggcatcgcgctcgcgctcgccgccggcgatgccggttacgtcccgctcggccacaagcaggccggcggcggcgccgggctgttcgatgccggactggcgcccgaccagatcaaggcttcagacgcgctcgcggcactcaagccgctgctggagtccccggggcttctcaaggtcggcttcaacgtcaagttcgcaagcgtgctgctggcgcaacacggcatcaccctgcgcaataccgacgatgcgcagctgatgtcatacgcgctcgatgccggccgcggctcgcacgcgctggaagcgctcgccgagcgctcgttcggccatgccatgatcgcctatggcgcgctggtcggcagcggcaagggcaagctcaccttcgaccaggtcaccatcgacagggcgaccgaatattcggccgagagcgccgatgcgaccttgcggctgtggcgtatcctcaagccgcgcctggtcgccgaccgcatggggaccgtctacgagacgctggagcggccgctggtcgcggtgctggcgcgaatggagcgccgcggcatctcgatcgaccgccaggtgctgtcgcggctgtcgggggatttcgcccagactgccgcacgcgtggaagccgagatccaggagatcgccggcgagccggtcaatgtcggcagccccaagcagatcggcgacatcctgttcggcaagatgggattgtccggcggcaccaaaaccaagaccggcgcgtggtccacgaccgcgcaggtgctcgacgacctcgccgagcagggccacgcgctgccgagcaagatcctggagtggcgccaggtctccaagctgaagtcgacctacaccgacgcgctgccgacctatgtcaacccgcagacccatcgcgtgcacaccacctacgcgctggccgcgaccaccacggggcggctgtcgtcgaacgagccgaacttgcagaacatcccggttcgcaccgaggacggccgcaagatccgccgcgccttcatcgcgacgcccgggcacaagctggtgtcggcggactactcgcagatcgaattgcggctgcttgcggagatcgccgacgtgccggtgctgcgccaggcgttccgcgacgggctcgacattcacgcgatgaccgcctccgaaatgttcggcgtgccgatcaaggacatgccgagcgaggtgcggcgccgtgccaaggcgatcaatttcggcatcatctacggcatctcggcgttcggcctcgccaaccagctcggcatcgcccgcgaggaagcctcggcctacatcaagaagtatttcgagcgcttcccgggcatccgcgcctatatggacgagaccaaggagttctgccgcaggaacggctacgtcaccacgctgttcggccgcaaaatgtactaccccgagatcaaggcatcgaacgcctcgcaccgggccttcaacgagcgcgccgcgatcaacgcgcgcttgcaaggcaccgcggccgacatcatccgccgcgccatgatccgggtcgaggacgcgctcgccgagaagaagctctcggcgcagatgctcttgcaggtgcatgacgaactgatcttcgaggtgcccgacaacgaggtcgcggcgacgctgccggtggtgcagaaggtgatgcaggacgcgccgttcccggccgtgatcctgtcgctgccgctccaggtcgatgcccgcgccgccaacaattgggacgaggcgcattagagtctaccttgcctcggcctcatcgtcattccggagatcgccgaaggcgagagcccggaatccattcatccgcacgttatgtggcccgatggattccgggctcgtgcttcgcacgccccggaatgacggcgagagatcggggagagctgcaatccacattgctccgagagcaattccagcatggccgcgcggcggatgacgcgctagaagtgcgtgcatcccctcgcgagacccatcatgccccacacatccgcgttgctcggctttgcgctcgtctgcctcggcatggtgctgacgccgggaccgaacatgatgtacctgatctcgcgctcgatcacgcaggggccggcggccggcatcgtctcgctcggcggcgtcgcgctcggcttcgtgttctacatgctgtgcgcagcgttcggcatcactgcactcttgttcgcgatcccctacgcttatgacgcgctgcgcttcgccggtgcggcctatctgctctggctggcatggcaggccgtgaggcccggcggccgctcgccgttccaggtcaaggcgatgaaggtcgacggcccgcgcaaattgttcgcaatgggcttcctcaccaatctgctgaatccgaagatcgcgatgctctatctggcgctgctgccgcagttcatcgatcccgccggcggcagcgtgctgacgcagtcgctcgcgctcggctcgatccagatcgtgatcagcgtcagcgtcaacgcgatgatcgcgctcgccgccggctcgatcgcggtgttcctcggcacccgcccgacctggctcctggtgcagcgctggctgatgggcaccgtgctcgcagggcttgcgatgaagatggcgcttgaagcgcggcgggcctaataagtaccctctccccttgtgggagaggatggcacaatcgagcggagcgagatgaagccgggtgagtttgcatccgcggagagaactccctcatccggctcgcatctttcggacgcggcggatcacaataagcggcgctcgatgagcttcttgactaggtcctcggtggtgatgatgggcacagttgcaccgtcaaaagcggcaaataggcgctttgtcgcttcatcgacaaattgaggaagagctgaaagcggcgtctcaagcgggaattgaacgcacgtttcgacaacgtcatcgtgcgctttgccaccatcccgaaagatgtattgctggtttgcccaattggtcagcgatctacctgatagctggtgccaccggaaggcaaaaccaagagtagttttctccggctcgcagcccaaagctttcgacagcgcaatgccgaccgccattgcttctgccactcgcaagatcattagcgtcggatcgagtacacggcccggccgaattcgggcaggcacgccatcatcctgtaaaagccggtgaagaaagaactcacctttagggtcaaggcgcgcaaaatcgatgtggtccgaaaattccggtgacgcggacacgacgaggtattcaaatgcgtcctcccgcaccttcgtgcgattctctgcatcggacatcgttctagcgtccatccagataggccatccagtataccgaggattgctgacagctaagcgatctaggacctcctgattggcgatggcgttctgccgaggtggatcaacgacgagggcaacactccaaaaggcgcggccgacaagtggcttctcctcggcagaaagcttccgattttttatgcgctctttgtatcggctttcacccgcatctatgacgctcaacgctcgatcacagagcgtgggtgcctgtggctggctcgtcgaaaacttcaacaatgaacctaaatcaagccccggcaaatggcggcgaatgaaccgtcctacgtccgcttctcgattatcaaagcaaatctcaactatttctggccaatcgcgtgctagcgcctcagtggtacttacagtgccattcgatgaaagtgaccggaaatagacggtattgtttcttatcaggatttgcgaaccgtctttcaactcgcgtttagccgcgacaggtactttgacgccggatggcacggatagcactgggtacgatgccccctggcgttcgctccaattcaccgtgacctcaaatggctcagaggcatattttgagattatcccctgaatgacatcgacatggaaaagcgcctcagcgttcgctggtcgcttggccgtatctggcgtcaaggtcttgtcgtcgaagccgataacaaaaaagcccccattacgattgcgaagcgccattgctcccttagcgatttttgcaattcctgcgggctgcgtcggatcaatccaagtcttgatctccaccgttaagctctcagagggtgatgcgactattgcatcgaccactgacttttctgccatgtaaatttccgtcctttggccaggagttcgctatcgcctcatcggaaagggcggcattcaagcgtagcaccgccgctcgcgcaaggtgcatcattcctctgccacagctattgtgatccacggatcgcgcgccgcccaacccgcgatgtgcgcgaaaacttcatcaagtgcgtgcagcgagccgagcacctcgccggtcagcccgcgagcggcgagtaagacagacagcatggtccgtcatcccggccttcgcgctttcaatttgtcgcgctgccgtgcggccatcgccgacagaaagtttggagcttccagatcggtaagactataactgtggtcgtaaccctcgatctctcttgggcgcgcagcaattcttacgttgtccgcaaacgtgcaaagatagatctgtttcgacttccagaaccaacgttcttcggcaatgccggttacaatacctggctgcccctctttcacaggcccaaaattccgaactgcaataacccttgcgccgatctctagagatgtagtgctcattggttgttccgcgcacccctatcagggcactgacctgaccatagcaggttaagtcgagtaccatttcccaccagtatcagcggaatttctgtttttgcacaggcaatacattccgaacgaccgtagattgatgttgctaagttatttccactactgactttcccacgggggagaagggaagagcgcccaccgcccctcaatccagcttcgcttccatcccgcgcttggtcgcggggcgggccatcagcgtctcataccagcgcttgacgttggggaagtctgatagctcgaccttgtggcgcggatggcgccaggcccagccgaggatggcgaaatcggcaaccgagagctcgccggcgacgaagtcgcggccatccagcctgcgatccagcacgccatagagccgtcgcgtctcggccatgtagcgcttcaggccgtaggcgcggtcctgctcgttctccagcgcgatgaaatgatgcacctggcccggcatcgggccgaaaccgcccatctgccacatcagccattcatagaccggaatccgctcggcgagcggtttcggcaggaacttgccggtcttctcgccgagatagagcaggatcgcgccggactcgaagatgctgaccggcttgccgccgggaccatcgggatcgacgatcgccgggatcttgttgttcgggctgatcgcgaggaaggcgggcgccatctgctcgcccttgccgatgttcaccgggatcaccttgtagggcagccccatctcctccagcgccaccgagatcttgaggccattgggcgtgttccaggtgtgcagctcgatggtcatttccgcttcccgtgcaagtgtttggcagagtgtttggtgcctgcttacggggattggaacggccgcacaaccgcgctttccggaaagctcgcccgcggaaatcgcggcatgggcgctgttgacggcccgatttccgcgctggaatgtgccggtcagcgtggatagattgccgcccgcctcaaaccctcaagggaaaagtctttgtccaaatcagcctcccgcgcccgcctcgccgagatcatccgcaagcgctcgttcggccgcggcgagatcacgttggcgtcgggccgcaagagcgacttctatttcaacctgaagccgacgatgctcgatcccgagggcgcagcgctgctcgccgagctcacttacgaggcgctgaaggacgacaagctcgatttcgtcggcgggctggagatgggcgcggtgccgctcgccggcgcgatcgcgcagctgtcctggctgaagggtcatccgatcgcggccttcttcgtgcgcaagaagccgaaggagcacggcgcgcggctcgcggtggaaggcctcgccaagggcgagagcctggccggcaagcgcatcgtgatcgtcgaggacgtcaccacgaccggcggctcggcgctgaaggcggtggaagcggtgcgcgaggccggcggcgagatcgcgctggtcttcaccatggtcgaccgcgaggaaggcgccaccgaaacgttcgccgaggccggcctgccgttccgcgcgctgtacaaggccggcgagttcctgaaggactgaggttctttcgcagccgtcgcggccagatgcataggccgcgccatccccgtttcttgtgacgccgtcacgcccgatcaatcgctcgtttaccatcccaccgtagggtgaatccgccggggcaccttgccgcggcgcgtcgggtggagttggcgttgcgtacagagttgagtgatcggcgcgtgcggcgctgcgtgatgcttgccgccgcagccattgcgggttccgtcctggtcgtgcccgctcccgtctcggccgaagggctgttcgacttgttcttcggcggtgcccagaagcagcagggccggcaggctccgccgcaggccaatttcttcgccgatccgttcggcctcaaccagcagccggaacggcagcagtccgcgcccgcctcggcgccgcgcgtcgcgggttccggaccggcctattgcgtgcgcagctgcgatggcaaatattttccgctgacgatgcgcggcaacgcgacgccggcgcagctctgccaggcgttctgtccggcgagcgccaccaaggtctattacggcagccatatcgacagctccgcatcgagcaccggcgagcgctacaccgacagcgagaatgccttcgcctatcgcaaggcgctgcgcgccgactgcacctgcaacggccgcgacccggcggggctcgccccggtcgatctcgcgctcgatgcctcgctgaaagccggcgacgtgatcgcgaccaccgacggtctcgtcgcctataccggcgtccgcgtcggcaacgagcagtcgttcgacttcacgccggtcgcgtcctatcccgggctcaccgcagcggtccgcgcgcggctcggcgaaatgaaggttgcgcccgtcagcgccgaactcgcgagcgacgcgccgctgccggagaccggccgcgatgtcgcgccgtcgtccgtcgcgccgaagggcaacgcggcaaagtccggcaagcgcgccgaggcgaattaacgcgccacgatcacgccgataacgttcggcgcggccaggtatttctcctcgatcgcggcccgcgcggcggcgcggttctccgggttgaggagcccgcgcttctcggcgaggatcatccagcaatagccccaccaatccgtcagcatgccgtgatcgtcgaccaggtcgtagccctgctcggcggcgaacaggcgcgcatgcgcctcgtcgagcgaatcgagccaggcgtgatcctcgagcgaaaacagctcgtcgctgaaatcatccgtggtgtagccccagatcgacatgcagaccgcgttgaactcgcgatcgagctgatcgtcgtcgatcggctggcgccgcgagacctggtgcagtcgcgacagcgagcgggcgaaatccgcgatgcgggtgagagcgaactgatcgaaggcgatggtggacatgtagtcctcgcgaaggctgggagaccctagatattgtatcggcgcagcgccgaatcatgatgatatatcaaagacttgctaaagtgttcttaattcgttctagttggtttgcaaattatctgcaacgtcgccccggcgaaggccggggcccataaccaccgcaatccgacatctcacgtgagaggtgccgcaaaatgaacgccacagtctattacgtctacattctcgcgagccgtcgccacgggacactctacatcggcgtcaccaacgatcttctcaatcggctgacgctccatcgctccggacgcggctcgcaattcgtcaagaagtacggcgtcacacgtctggtttacacggaggcctacgcttcaccgcaggaggcgatcgcgcgggaaaaagcgctcaaggaatggcgccgcgactggaagattcgcctgatcgagcaagacaatccggagtggggcgacctgtcccaccttctctgatggctgtggttatgggccccggccttcgccggggcgacgaatttgcggtgactgtcttcgcctcatgaaaaggcggccgcaatgaaactgccagccccccaaaagcaattcgggccgctgacttaagtcagcggcccgttgaaaatggcttcgaaatgaaatgcgtcggagctaaaatatgtgcccgccccacgagcgactgctctggttgtaaagacctcgttaaaccttggaaatccgtatcatcacggtgtttccgacccgcgcatgaagccgcgttgcgcggtgttcaattcgccgacagcaacctgtcgccgcaagcgttcgcgtcaaacttgccgccgcattgtcgcttgatggcggcgcagcgcgcggccggcaaaattgtcgcaaaatctcggcgctcacggacgacgacagcactgcaaccagcaggcccgaatgcctgaaatcggcccggtccttgcataaaatcgcggcaggtgcggtgcatggcggctctcgacggtttcggttgcagcgcaacgcgcgtatcattgcggtgagtttgaacggcggggattggcgttgcaggaacagacaaactacccggcactgaaccagccgatcgacgagctggcgctgaccgagatcaagggtgcgatcctggccaagctgcggcttgcgatcggcaaggacgccactgttgcgaccaggcgcgactggtacaaggcggcgacgctggcgctgcgcgaccgcatcgtgcaccattggctgaccgccgagaagcagagctacgatgccggcgccaagcgcgtctactatctctcgctcgaattcctgatcggccggctgttcaccgacgcgctgaacaatatgggactgctgccgctgttcgaggccgcgctcggcgacctcggtgtcgatctctcggacctgcgcaaatgcgagccggacgccgcgctcggcaatggcggcctcgggcggctcgcggcctgcttcatggagagcatggcgacgctggcgatccccgcaaccggctacggcatccgctacgatttcggtctgttccgccagatcatgaaccagggctggcagcaggaatatcccgacgaatggctggcgttcggcaacccctgggaattccagcggccggaggtggtctacaacgtccatttcggcggccatgtcgagcatgtcgacgaccgcggccgcgactgcgccacctggcatccggcggaaaccgtcgaggcgatggcctacgacacgccgatcgtgggctggcgcggccagcacgtcaacgcgctgcggctgtggtcggcgcatgcgcccgacccgctcaagctcgacgtcttcaacaccggcgactacgtctcggccagcgccgagcaggcgcgcgcggaggcgatctgcaaattcctctacccgaacgacgagagtgcggcgggccgcgagctgcggctgcgccaggaatatttcttcgtctcggcctcgttgcaggatctcatcaaccgccatctcgcctccgacggcggcctgcgcaatctcgcgcagaaggcggcggtgcagctcaacgacacccatccgagcctcgccgtcaccgagctgatgcgcatcctggtcgacctgcacaatttccgctgggacgaggcctggaagattacggtagcaaccctgtcctacaccaaccacacgctgctgccggaggcgctcgagacctggccggtcgaactgttcgagcggctgttgccgcggcatctcgagatcatctaccgcatcaacgtggcgcatctcgcgctcgccgaggagcgcttcccgggcgacatcgagtatcgtgcgtcggtctcgctgatcgacgaacgcagcggccgccgggtgcggatgggccaactcgccttcgtcggctcgcatcgcatcaacggcgtctcggcgatgcattccgacctgatgaaggagaccgtgttccacgatctgcatcatctctatccccagcgcatcaccaacaagaccaacggcatcaccttccgccgctggctgatgctggccaatccgcggctgaccgcgctgttgcgcgagacctgcggcgaagccgtgctcgacgacttctcgctgctcgatcggctcgaggcgcattcgagcgacctcgaattccagaagcggttccgcgacgtcaagcatcacaacaagctggcgctggcgcggctgatcggcgagcgcaaccacgtcaaggtcgacccgtcggcgctgttcgacgtgcagatcaagcgcatccacgaatacaagcggcagctgctcaacatcctggagacgatcgcgctgtatcacgcgatgaaggacgacccggccgcaaactgggtgccgcgggtaaaaatcttcgccggcaaggcggcggcgagctatcgctacgccaagctgatcatcaagctgatcaacgacgtcgccgaggtggtcaacaacgacgcctcgctcggcggcaggctgaaggtggtcttcctcgccgactacaatgttagccttgccgaggtgatcattccggccgccgatctctccgagcagatctcgaccgccggcatggaggcctccggcaccggcaacatgaagctcgcgctgaacggcgcgctgaccatcggcacgctcgacggcgccaatatcgagatccgcgacgcggtcggccccgagaacatcgcgattttcgggctggaggccggcgacgtcatggtccgccgcaagcaggggctcgatgccagtgacgtgatccgcaaatcgccgcggctcgagcgcgcgatccgcgccatcgagagcggcgagttctcgccgggcgatgccgcgcgcttcgcctcgatcgggcacgcgctgcgctatctcgaccactacatggtctccgccgacttcgattcctactacgatgcgcaacgcggcatcgacgcccgctggcaggtgccgccggcctggacccgcgcctcgatcctcaacgtggcgcgcatggcgtggttctcctccgaccgcaccatccgcgaatacgccgaggacatctggcacgttccagtgcatccgagcgccgcgccgcagctgggtaaccagcgcgaggcgaaggggtaatcccggggcacggaaatcgattacgtgcgacatcattgaattcggcgcgacggcccgcgatattcattgtgaacgcacgccgtcgttgcgaggagcgaagcgacgagcaatccacccatccggatatgcggcacgctggattgcttcgccgcgcattttcgatccaaggatttacatgctcaccaagaccccgcaccttttcgatgaagccaccgccgtgactgccggcgacagccgctggcagggacgcaccagcccggattactgggccttcgtcggcccgttcggcggctgcacagcggcgaccatcctgcgcgcgttgatgcagcatccgcagcgcgcgggcgatccgctggcgctgacggtcaattactgcgcgccggtcgccgagggcgtgttcgatctcgatgtccgcctggtcaaggccaaccgctcgagccagcattggtcggtcgagatgacgcaaggcggcggtgaggtcacgacgctggcgaccgcggtgttcgctgagcgtcgcccctcctggtcgcaccagccggcgcaatttccgggcgccgtgccgttcgagcagctgcggccctatccgaagctcgcgatgacctggcccaaccagtacgatttccgcttcgccgagggcgagccgaaattcgccggtggcggcggtgcaaaggtgccgtcgagcccctattcgaagctgtggattgccgaccgcgtgccgcgcaagctcgacgcgctgtcgctgatgtcgatgtcggatgcgttcttcggccgcgtcttccacgcccggcatgagctggtgccgttcggcacggtgtcgctgacgacctatttccacgccgacgcggccgacctcgatgccgaggataccacccgcgtgctcgccacggccgacgcaaagaccttccacaagagctatggcgaccagcacggcgaattgtggtcgccctccggccgcctgctcgccaccacgacgcagatcgcctatttcaaggcgtagcgttttcgagcgaagtgggtaccggttcgcgtgaagaaaacgcgtcaagtcaaggcgtagtcaaatatccacattggtctgctgggaccgcattgcctatttcaagggttgggggaacattggcgcgtcgcttctgttccacacccttgggagcactgccgcatgtccgaagccgacacttcgaagccctcgcgcatcgcgctgcttggcgttcccatcgagatcggcgcatcgcagcccggtccgctgatgggaccggacgcgctgcgcaccgcaggcatcgcgcgcctgctcgagcagctcgacttccaggtcgacgaccacggcaaccttgcgatcccggctgtggtcgccgacggcccggtgccggccaacaccaagttctatgacgaggtgaagacctggacccgcgcggtctccgagcgcgcctactggctggcgcattccggcgcgatcccgatcttcatgggcggcgatcactcgctgtcgatggggtcgatcaacggcgttgcccgctactggaaagagagagaccggccgctgttcgcgctgtgggtcgacgcccatgccgactacaacacaccggccacgaccatcaccggcaacatgcacggcatgtcggcggcgttcctgtgcggcgaggacgggctggacgacctgctgggcggattgcctcgcgcctcgatcccatcggatcagctggcgctgatcggcacccggtcggtcgatccgctggagcgcaagctgctgcggcaacgcaacgtctcgatcgcggacatgcgccagatcgacgagttcggcgtcgctgtgctgacccgccgcgtcatcgaacgcgtcaaggccaagaacggcgtgctgcatgtctcgttcgacgtcgacttcctcgatcccgacatcgcgccgggcgtcggcaccacggttccgggcggcgcgacctatcgggaagcgcatctcatcatggagctgctgcatgattccgggctggtgcgctcgctcgatatcgtcgagctcaatccgttcctcgacgagcgcggccgcaccgcgcgcgtcgcggtcgaactgaccggcagcctgttcgggcttcagatcaccgacaggcagacgccgagcaacgcggtgctgccggagatgggcgagtagcggaataacacactcgatgtcgtcccggcgaaggccgggacccatactccgcagcggatgttgtgggtgggactcgtcattccgccgacgcgcaacaatgactatcggtggttatgggtcccggccttcgccgggacgacagcggaatatttggcgagccgactaggcaaacaaaaaggcggccacgaaggccgccctttccaatcgcgtatcgtttgcgcggcttactccgccgcgagcttcacttccggcgcggcggcgcggacttcggcgtcgacctgcgcttcgaacttggcgaagttcttctggaacatgccgaccagcgcacgcgcggtcttgtcgaactcggccttgtcggcccaggtcttgatcggatcgaggatgtgcggctcgacgcccggcaacgaggtcggcaccgcgaagccgaaatacttgtcagtgcggaagtcggcgttgcgcaagctgccgttcagcgccgcggtgagcagcgcgcgggtcaccttgatcggcatgcggcggccggtgccgtacttgccgccggtccagccggtgttgaccagccagcaatcgacatcgtgttttgcaatcagctcgcggagcagattgccgtagaccgacggatcgcgcggcaggaacggcgagccgaagcaggtcgagaattccggctgcggctcgttgccgagaccacgctcggtgccggcgaccttcgcggtgtagccggacaggaagtgatacatcgcctgcgccggcgtcagcttggcgatcggcggcatcacgccgaaggcgtcggccgcgagcatcaccacgttcttcggatgcggcgcgcggccggtgcgcgaggcgttcgggatgaaatcgagcggataggccgagcgggtgttctcggtcttcgagccgtcgtcgaagtcaggcacgcgatcattgacgccgagcacgacgttctccagcaccgcgccgaagcgcttgctggcggcatagatctccggttcggcctcgcccgacagcttgatgcacttggcgtagcagccgccttcgaaattgaagacgccgtcctcgctccagccatgctcgtcgtcgccgatcagcgtgcgcttcggatcggcggacagcgtggtcttgccggtgccggacaggccgaagaagatcgcggtgtcgccgtcggggccgacattggccgagcagtgcatcggcatcacgcccttctcgggcaggtagaagttcagcgtggtgaacacgctcttcttcatttcgccggcataataagacccgccgatcaggacgatcttgcgggcgaaatcgatcgcgacgacgttctccgacttgcagccgtgacgtttcggatcggcgcggaagctcggcagatcgatgatcgtgagctccggcacgaagcccgcgagctcggacgtctcaggacgaatgagcagcgtgcggatgaacagagagtgccaggcgagctcggtgaagacgcgcgtcttgatgcgatgcttcggatcggcgccgccatagaggtcctgcgcgaacagcgtcatgccttcggcatgcttgatgaagtcggcatgcagcgttgcgaactgctccgaggtgatcgactggttgccggcccaccacatgctcttgtcggtcaggccgtcgcggaccgtgaacttgtccttcgggctgcggccggtgaactcaccggtgtcagcgcaaagcgcgccatcggccgagagcaccgcttcgccattgcgcaacgcgtgctcgtagagctgcggcgcaccatagttccaatgcacgcccttgagattttttaagccgaatttgtcggcgccgaaggcaccgttatgcacgcccgtctcttgcacgaagaacctcctcgaacccgcgtatccttgttcgcgcgaatgtcgctagtcgcgccccgtcgcggtgatgaccgtcatcagaatatagcctctcggccccggtccggcgacctaatagtggggatcgccgggcttgccaagccagtcgatcggcttttggtttattccaacaggggtacatcatccggcgcaaataccgcagcgcgaaaccctttcgcttcgctttcgctttcgtattgttttcaccgcgttcgagcgacgtttcgccgctttcccgctgcgaacgaggccttgcgatgcacaaagagtgccagcgattagcgtgtgcgttcgccgattgctgcataagacaaggggaatgccgggtatgcgtttcgcgctgaggatgtgtcgttgcaatggactgccgcgagttgacgctgcgctgcgctgccgaggacgtcgcccacgatcgtggtgcacgtggatcgagctgcgttcggttgagctcagcatgcttcgtcgaagctgggtgagttcaatgcccggcatcggccaatgttccgcaacgccctttggacagatcgcgggccgttacgatcgatggtaacgcaatcaacatctgacgcccgcgtgtcgtcgcggcctgagccccggggtccgaatgattttccgatgctgcagaaaatcccacatgcgcatcgagccgatcagcgatgacgtgccgcgccgggaccgaattgatcgcgctatcaaaagccccgcacgcagcctctgcctgcacgcatcatgcgacacgatgcctcgccaggcgcagcaccatcgtcggcgccgccagcgcgcattcccctagcccttggcccgcgcttcgccggcgagccgcaccagcatcttgcgcagctcggtgccgttgctgacccgctcggggaaatcgagccgcagcgtggcgcggccggcctgcatgtccatgccgtcggggtcgcagccggtgcacagccaatcggcgctgtcggcgccgagcagccgcgtggcgtagaggttcatcgcctcgcggtggtcctcgttcatgtgcgccaccgcgcccggctcggcctccagcagcgcctcggcgccgccgagatcggtcaggaattgggcgggcttgaggtcgacgatgcggccgaacccggcgaccagatgggcgccgctcggccggatcacgaagaacgaaaaatccttaaattctacaaagacttccgccgacggctgggcagcgagataacgccgttgggcgagctcacgcccggcctcggcgacctcctcggcctttcccgccagcatgatccgggcgccctccaagggatcgccctcggcacgctcgtccagcatcagggacacccggctgtcggccaggatgttcctggtgtgcagcgccagccgggaaatcagcaggatcggcgagccgtccggatggctggcgaggttgaccagggagcaatagggatcgccggagccggccgtcagcgtggcgagcgcgccctggcggctgcgccgaagcagcgagcgggcaaggtgggcaggatcgaagtcggtggtcggttgcataggcctgtcgggtcattttgagggcgaatcgggccggttccgcatgaaaaaagggcctgttttcatggtctcagggtggtatatggggtccatcgcatgggtcgcagaagcgtattttttgcggaactcggtcacacttcagcccagcttgcattgctcgttgaccgcgttcgaagcccatttccacggcgcgtcgcccgagtgcccgccgtttaagccactctcattgtgaaagcagctcatgcccacaatcgccctggtcgacgacgaccgcaacattctcacttcggtctcgatcgcgcttgaagccgaaggctaccgcatcatgacctacacggacggtgcgtcggcgctggatgggtttcgcacgtcgccccccgatcttgcgatcctcgatatcaagatgccgcgcatggacggcatggaaacgctgcgccggctgcgccagaagtccgacctgccggtgatcttcctcacctcgaaggacgaagagatcgacgaattgttcggcctgaaaatgggcgccgacgatttcatccgcaagccgttctcgcagcgcctcttggtcgaacgcgtcaaggccgtgctccgccgcggccagcccaaggacccgactgccgcgccgaaggagccggacgcccgcgcgctcgaccgcggcctgctgcggatggatccggagcgccacacctgcacctggaagaacgagccagtgacgctcaccgtgaccgaattcctgatcctgcaggcgctcgccacccgccccggcgtggtgaagagccgcaacgcgctgatggacgcggcctatgacgaccaagtctatgtcgacgaccgcaccatcgacagccacatcaagcggctgcgcaagaagttcaaggtggtcgacgacgacttcgagatgatcgagacgctgtacggcgtcggctatcgcttcaaggaagcctgatctgcgcttcccgggcggcttgttgactgacaggctccgcacggctgaggtaagctcgggccatcaaatgcttcgcgggacgacatccataccaaccggcagctttgccagtgcttgatcgaacgcagctcgagcagggcctgaacaccgaggacgcctcacagctcctcgatcacgaggccgtggccgacgatccgacggagaaaggctggcgccggccgctcggctggctgcgccgcgccggccagttcttcttcgcgctgtcgttctcgagcctgacgcgccgcatcgtctcgctcaacctcgccggtctcgtcgcgctggtcgcgagcatcctctatctgtcgcaattccgcgccggcctgatcgaggcccgcacccagagcctgctggtctatgccgagatcatctcggaggcgatcgcggcgtctgcgaccgtcgaaggcaacaccgtcaccatcgatcccgaccggctgctcgacctcaagcccggcgagagcttcggccagccggatgaatcggctgacttcccgatcaatcccgaacgcgtcgcgccgatcctgcgccgcctgatcgcgccgaccaagacgcgggcccgcatcttcgaccgcgacggcggcctgatcctcgacagccgcaacctgttcgcgcgcggcgacgtgctgcgcatggagctgccgccgccgtccgagaagccgtcgctgtatgagacgaccaaggccaccatcaagacctggctcaaccgcggcgacctgccgatctaccgcgagctcggccccgagggcggcaagggctactccgaagtcgcgcaatcgctcgagggcatgaagggcagcgccgtgcgcgtcaccgaccgcggcgcgatcatcgtgtccgttgcggttccggtgcagcatttccgcgccgtgcgcggcgcattgatgctgacgacgcagggcgacgacatcgaccagctggtgatgtcggagcgcctcgccattctcaagatcggcggggtcgcctccgccgtcatgatcatgctgtcgctcttgctcgcgagcacgatcgcgggcccggtgcggcggcttgccgaaagcgccgagcgcgtccgtcaccgcatccagacccgcgtcgagattcccgacttcaccgggcggcgcgacgagatcggccatctctccggcgcgctgcgcgacatgaccaacgcgctgtacagccgcattgaagcgatcgagatgttcgccgccgatgtcgcccatgagctgaagaacccgctgacctcgctgcgctcggcggtcgagacgctgcccttggcgcgcaacgagaacagccgcgcacggctgctcgccgtgatcgagcatgacgttaagcggctcgaccgcctgatctccgacatatcagatgcaagccggctcgatgccgaaatgcagcgccaggatatggcgccggtcgatctgcgccggctgctgacgacgctgaccagcgtcgccaatgagacaaggctcggccacgacgtcgccgtcgaggtccgcttcgagggccgtggaccgaccgacacgctctcggtgcccggccatgattcccggctcggccaggtgatctcgaacctgctgtcgaacgcgcaatcattctccaagccgggcgacaaggtgcgcatcgtctgccgccgcacccgcggcgaggtcgagatcgtggtcgacgatgacgggcccggcatcggcgaggacgcgctggagcggatcttcgagcgcttctacaccgaccggccgcaccagggctttggccagaactccggcctcgggctctcgatctccaagcagatcatcgaagcgcacggcggacggatctgggcggagaaccgccccggccccgcggacgaagacggcaagccaacagtggccggcgcacgcttcgtggtcaggctgccgaccctatgagcgacaattcaagcgtgcacgcatccgccgttctggtcggcgagcgtgcggtgctgatccgcggcccgtcgggcgccggcaagtcgcgcctggccttcgatctgattctcgccgggcgcaccggagccctgccgccggccattttggtgggggatgaccgtgtccatctcgacacagccggcgaacaattgtgggtgcgtccggtgcggcaattggccggtctgatcgagatccggggcctcggaatccgccattgtccgttcgcggacgaggccgtgctcggcctggtcgtcgaccttgccgccggagatgccgagcggctgccgccccccgaggcgctccaggctcggcttaatggtgttttgataccgcgaattcccgttgcggcaggcttccaacccctgccgctggttgtcgctgcgctgacgacaacctgaaagttcatcgtcccgtaatcttgcggccaattgtgggaagggaattggtaaccatatcacatccacaatcgcgtcggattttgccggcgcagcctcccctctctaccgccaggaaccgggagactagccaagatgccctcttgcgcagggcctctggatggtcaaagtggcgcgttcgtgcggtgcaccaatgggcgcccgcgaggagtttccgatgattggtctagtgctggtgacccatgggcgccttgccgacgagttcagggcggcgctcgaacacgtcatgggtccgcagaaacaaattgaagcgattacgatcggtgccgaggacgattccgatctctgtcgaagcgacattatcgaggcggtgaaccgcgtcgatagcggcgacggcgttgcgatcctcaccgacatgttcggcggcacgccgtcgaacctcgcgatctcctgcatgagccgcccgaaggtggaagtgctcgcgggcatcaatcttcccatgctggtcaagcttgccaaggttcgcgaggagcgttcgctgcccgacgcgatcgcgatggcgcaggaagccggccgcaaatacgtcaccatcgccagccgcgttctcgcaggcaaatgagcgacgaggccccgggcgaaaaccatgtcggcccgggcgtgccagcgggcgccatttcccgtgaactgttgatcgtcaacaagcgcggcctgcatgcgcgggcatccgcgaaattcgtgcagctggtcgagcgcttcaacgccgaggtctgggtcacgcgcggcggcgagaccgtcggcggcacttcgatcatgggcctcatgatgctggccgcagggcccggcaccaccgtcgttgtctccgccaagggcgaagaggcgcaacaagcgctcgacgccatcgctgaactcgtcgccagcaagttcaacgaggaaggcacgtaacggcgcgctcgacccgtgaggaaaccctacttcgccggcggcaccagatagactttccacgccgtcgacggaccgggatggccgttgaagaagcgcatggtggtcatcaccagcggctcggcatccttggcatgctcggccatccacgcctcgcatggttgcaggaacaccggatcggtggtgtcgcagatgccgatgaagccgagacgcctggcttcgtcgagcgacgtcagccccgatgaccatgcttcgcccggcaccagcgatgccggatgatccggactgtagaacgtcatcggctcgccgatgtccgagcgtgcgatgaccacggcccagcgcgaatggaagttcgcctgccaggtctgggtgagctcgcgcgccaattcggagcgcgcggcgtaggtcgagccgccggtacggttggacgcgatctcctgcgtggcgatcgagggcgcggccatcagcgtcgcgatcgtggccaccaaccagaccgcaatgatcgagaacagcgccatgcgggggaaacgcagcgaggggatcgcaaccagcgccagcggcaccaggaagaacagcggaatgccccagtcggtcttgatatagacggtgaatgccagcgcgccgagcggcggcccgatcgcgacgatcgcctggatgatccagacgttgaacgcctgcggaaggttgacggccggattgggtctgcgcgaccagatccgcgccagcacgtccgacggccgccatggcaccgagcccagcagcagcgcgacgaggcccagcacgacgggaatcgcgagcagcccgagattgtggatgatatacccgatcacgagctggacgttgagctcgcggctcgacagcgcatagacgtcgccggcataggtgaacggcacgaagttcacctcctcgagccacaccaggtgcggaatcatcgccacgatcatcgtgccgatcgcaacccatggcgccggcgagcgcaggaactgggcccgctgcggatggatcaacgcggcaagcccgatggcgccgatcatcgtcaccccccagtacttggtcatcagcgccagcatgccggcgaagccgagccagagacccgatttgaagctgcgcttctcgaacgcgttcagataggccagcaccaacagcggcagcggcaccagctgcgcgaggtcggcattgtatttgaagcccttgaagttgaagatcgggtagagcgcgagcatcaccaccatgaagaacgcgcggcgccgatccacgacgcgcagcgcgatcagccagcacaccacgagcgcgaagctgacggtcgccatcgcaagcgcataggtcgaccagttggtgaccgggaagatcctgaaccagaccccggcgatccagcccgacagcggcggatgcttgccatagccgagcaggaaacgctgcccccaggcataggcctccgcgacgtccatatggacgtcctgcgcggccttcagcttgaccaggataagcgtccagagaaacgcgtggaccaatgcgaagccgatcacgaaccacaggctggctctgggatcgatggcccgtgaggcaatccaggccgcgatccggcggatcgtcagcctgcgagtggtgcgccgggcggcaggaagaatggaagcggtcgacatggcctgtgcctgaggcatgacccggaaaaggggagcgtggctttccggagggatcataccgagtggaagcggacgtgcgatgagtgattgctcaccagcacatcggcgcgctttagcgcgtttttgtggccagtgaaatcagcttggcgtgagaacgcctccaacgagcccgttcacttctcgagaagctcaggccggtactcgaaatgcatggtatcgtagtgataccacctgccgccccagatgaagccgtggcgctcgaagatgtcgacgatctcttgcggcatccggttcttgtaggggatggttttacctttgcccgcccacagccagtagtccgagaccttcaggttgaggtcgatcgcggcggcatagccatgcatgctcatccgcccggtatcggcgacggcgcgacaagatagcacacccgcgatcggaaacgccgcggcgcgcagcgccggatcgagcgcgtcgatctcggcggagacctgcttcagccgctcggcgacgccgttggcccgtgtgacctgaaccggcttgccccaggatttcggcagccaggtgatcgtcaccaggttccgcttgacctcaccggtgttgcagtcgccatacatcttcttgaagaaggcctcgttgcggaagcggccgggatcgacatccacagccggcggcgccgccggccccaacggatagggcagccgcatctggtcgaggatcgatgcattgcgcagcatctgatcgaacggcttgtcggagacgccatcgtcgaccggcatcaccgtgccgtcccgccaggtgatcgtggtgtcgtcatgggtggcgagcgcatcgggataggcgcgcaccaggcggtcgagcagttcgcttttgctctgagcatgcgcaagcggcggcagcagcgccagcagggcaacgatgcaggccgcccctcgcgcggccattcagcgtttcccgacctgatcgatcagcgcgacattggcctcctcgatcgcgttcagcttcggattccagctgttcggcgcataccaggggaagcgcgaaaaatacgctttgagatcggcggaatcgaaatagcggcccctgcgggcaaagatctcgttgcgggcaatccgcaattcatcgcgcgacaaccgccgcagatcggccggcgtcagcagacgccggtcggaatccgggaagatgaatccgcttggtgcgccgccgccggattcaaagcgatcgatcagcgcgacattggcgctctcgaccgcattgagcggcggatcccatgagcgtgggacgtaccaggcgaacctgctgaagcgcgcggtcaggtccggcgcgttgaaatagcgtccgcgccgcgcgaagatctcgttgcgggcaatccgcagatcgtccttgctgagcgcgctgagatcgatctccgacagcaggcggctgtcggaatccggaatgatgaagtccgattgcgtgcgcgccacttgcggcgccgacggcgacgcacttggcggcggcaggttctgctgcggcggaatcaccgttgccggcggatcggcggtcgcgacctgtgccggcgcattgccggcgaaatagaacgagccgtcgatcggcgaggtcgagacccagggctgctgcgcgctgccggtcgcgcgcttgacgacgagcccgacctgattgaaggcctgcagcacgtcgagcccgggcttctgcatggtgtcgaccagcgcgcgcgtgtaggggctgtggccgtcatcgccgtccagcgcgacgttgccgggctgggtcgcataggacaacagcgtgccctcgggcgcgcggatctgggcgaggccgccgtcggcggcgcgcaggccgcgcccgccgaacggattgttccggcaggcgtcgaggacgacgatgttgagccgcgtgcccgcgccttccatctgccgcagcaccaggccgacatcgaccatctggaaatcgacatcggcctcgcgtgtcggattggccgacaccggcaccagatagttcgtgccgcgaacctggatgccgtggccggcgtaatagaacagcgcgacgtccgcgcccatcagctggctgccgaagcgctggatcgcggcatcgaagccggccttgtccagatccacctgggcctgcccgccgaccagcgcaaagcccagccgctgcagcgtctcggccaccagctgcgcgtcgcctttcgggttctgcagccgcgacacgttctgataggtcgaattgccgaccaccagcgccacgcgcttgtcggcggccgcgggcgccgcgaacaagatggcgagcaatccggcggcgagaagggtccagcgcatcgtcagatccacggatttcgggccgaaagacctagcagaaacatgcccggaaatcgatcattgcaaggctacgggaaacaccccgtgattcgccgtcacatccctgcaaaataccgcaatatggttgcccgcgcgggggtgcggatgctatcccgcgccccatgacaactgccccgatttccaacatccgcaacttctccatcgtcgcccatatcgaccatggcaaatcgaccctggccgaccgcctgatccagatgacgggcggcctgtcggatcgtgaaatggcgggcaaggagcaggtgctcgattcgatggatatcgagcgcgagcgcggcatcaccatcaaggcgcagaccgtgcgcctcaactaccgcgccaaggacggcaaggattacatcttcaatttgatggacacgcccggccacgtcgacttcgcctacgaggtctcgcggtcgctggcggcctgtgaaggttccctgctcgtggtcgacgccagccagggcgtcgaggcgcagacgctcgccaacgtctaccaggcgctcgacaacaatcacgagatcgtgccggtcctgaacaaggtcgacctgcccgcggccgagcccgagaaggtcaagcagcagatcgaggacgtgatcggcatcgacgcgtccgacgccgtgatgatctcggccaagaccggaatcggcgtgcccgacgtgctggaggcaatcgtcacccgcttgccgccgccgaagggcgaccgcgacgccacgctcaaggcgctgctggtcgacagctggtacgacgtctatctcggcgtggtcgtgctgatccgcgtcgtcgacggcgtgatgaagaagggtagccgcatccgcatgatgggcaccggtgccgcctacgacatcgagcgcgtcgggttcttcacgccgaagatgcagcaggtcgaggagctcggccccggcgagatcgggttcatcaccgcggcgatcaaggaagtcgccgacacccgcgtcggcgacaccatcaccgacgaccgcaagccggtcaccgaaatgctgccgggcttcaagcccgccattccagtcgtgttttgcggcctgttcccggtcgatgccgacgacttcgagacgctgcgcgcagcgatgggcaagctgcgcctcaacgacgccagcttctccttcgagatggaaacctcggccgcgctcggcttcggtttccgctgcggcttcctcgggctgctgcatctggaaatcatccaggagcggctgtcgcgcgaattcgacctcaatttgatcgcgaccgcaccgagcgtcatctacaagatgaagctgaccgacggcaccgagctcgaaatccacaacccggtcgacatgcccgatgtggtcaagatcgccgagatccaggagccgtggatcgaagcgacgatcctcaccccggacgaatatctcggcagcgtgctgaagctgtgccaggaccgccgcggcgcacagaaggagctgacctatgtcggctcccgcgcgatggtgaaatacgatctgccgctcaacgaggtggtgttcgatttctacgaccggctgaagtcggtctccaagggctatgcctcgttcgactatcacctgaccgactacaagccggcggatctggtcaagatgcagattctggtcaatgccgagccggtcgacgcgctgtcgatgctggtgcatcggacccgcgccgaaggccgcggccgcgccatggtcgagaagatgaaggagctgatcccgccgcacatgttccagatcccgatccaggcggcgatcggcggcaaggtgatcgcgcgcgaaaccgtccgcgcgctgcgcaaggacgtcaccgcgaagtgctacggcggcgacatcacgcgcaaacgcaagcttctggagaagcagaaggaaggcaagaagaagatgcggcagttcggcaaggtcgacatcccgcaggaagccttcatcgccgcgctcaaggtggatagctgaggcgacgtcacggactgtcgccggcctgcctgatatgatcgcgccagcccggctctcagcaaaaatctcgaaaacaaccccatgcaaagcagctggaggcggatagcgacacgccgccgcatgcgcgcatgttgcccgttcttgtcccagcaacaaaacgcaccatgatttgaatcgccttcgcaggacggcccgactaagctcctgccatgttgcgcatcttgtccctcctcgtcgtcatcctcgcattgctgcagccggacccgagttcggccgcgtcctcgaaaaagcggcagagcgcgcgctggcatggctatggcttcctgcccggctaccggcagccgcccaatcagaccattccggtgctcggcccgcgcggcgccgcccggggctacccggacttttcaccgcaatattggtatggcggcgactggcattacttcggccgccccggattccatggcgggggacgctacaatggcggcagctacggcccgtgctgggtctggacaccgatcgggcgcgcctgggagtgcggctaggctaatcgccgtccatgcatagcgggaagtccggccgtcgagcaggccagcttgcccgcggcggacggatgcgccacgatcaccctaagcgcggaccaacaacagcaagaccgcgcaacggggaaacgcatgagcaaggccgctcggttcgattatggctgggtcgtcgtcggcgcgggcgcgctgatgacctgcgtcggcttcggcaccatgctgtcgctcgccgtgttcctgcagccgatctccgatgcgatgggctggtcgcgcgccggggtgtcggccgcggcgacgctggatttcctctgcatgggctttgcggcgttcgcctggggcgcgctgtcggatcgcttcggcacccgcatcgtggtgctggccggcagcctgctgctcgggcttggcttggtgaccgcaagccaggcgcagagcctgtggcaattccagctctgcttcggcgtgctgatcgggatcgccgccggcagcttctatgcgccgatgatggcgcttgcgagcgcctggatcgacaagcatcgcagcctcgccgtcgcgctggtgtcggccggcatgggcgtttcgccgctgacggtcgccccctccgcaagctggctgatcacggcctatgattggcgcttcgcgatgctcgtgatcggcatcgccgcatgggtgctgctgatccctgcctcgttcctggtgcgcccggcgccgcagggaacgaacgtcgcgatgccaacggctgcgagcgcgccgcaaaccgaatggaccgtggcgcaggcgctgcgcacgccgcaattcatcacgctggcgctggcgcatttcgcctgctgcgcggcgcattcggggccgatcttccacatggtgtcctacgccatggtctgcggcatcgcgccgctcaccgcggtcacggtctacagcctcgccggcttctccgggctcggcggccggctgctgcttggtgtgctggcggatcggctcggcgccaagccggtgctggtcggcggcctgctggtgcaggcactgtcgatcgcgacttatctcgcggtggcgcagctcggcgagttctacgcgctgtcggtcgtgttcggcctcgcctatggcggcgtgatgccgctctatgccgtgctggtgcgcgagttcttcggcgcgcgcatcatgggcacggtgttcggcgcggtgtcggcgttcgcgagcctcggcatggcgctcgggccgtgggccggcggctacgtgttcgacacgttccatggctatacgtggctgcacgccggttccttcgcgatcggcctcgccgccgtcgccgtggcgctgagtttctcgaccaagcaccgaccctcgctcgatctcggccgcgctgccgcctgagcgcggatgcgtcagccgcgctcgcgcgtcggtgatggatagccggcctgcatcggcgccgtcccgccttgccctcccctgccggatgggtcaccatcgcgcgccctcaacaagaatgtcagaacgggccgaggacacgcatgaacaggccgcagggagtagaccttgtcgagcgggcgcgcgcgctggcgccgctgatcatcagcgaggccgacgagatcgaacggacccggcgactgacacctgccgtcacggcggcgctggtcgagaacggactgtaccgcgcgctgctgccgaagcgtttcggcggcgccgaggcgacgctggacgccttcatgcagatgcaggaggagatcgccaaggctgacgcatcgaccgcctggtgcctcggccaatgcagcgtctgcgccatgaccgcggcctatctcgagcccgacgtggccgacgagatcttcaacaccgcgcccgggattctcgcctggggcgcgatcgcccatgaagtccgcgccgagcccggtggctaccgcgccagcgcgcgctgggatttcgcctcgggctcgcggcaggcgagctggctcggcgcccatgtccgcatcgtcgaagcggatggttcgccgcgcaagaaggccgacggctcgccggagatccgcaccatcctgttcccgatgtcgcacgctgtgatgtacgacgtctgggatgtgatcggcctgaagggcaccggcaccgattcctattcggtcgacaacctcttcatccctgaaaaattcgccgcgctgcgcgacgatcccagcgcgtgccgcgagggagggccgctctacaagctctccaccaacatggtgttcagcatgggcttcgccgcgacctcgctcggcgtcgcgcgcgccatgctggatgcggcgaccgagttggcgcggggcaagaccccgcagggcctgaaagcgatgcgcgacaacaattcggtgcagggccagatcggccgcaccgaagccagcctgcgcgccgcgcgcgcctatctgtacgcgaccgcccacgaggtctggagcgatcttgcgagcggcggtcccatcaccgaggcgcaccgcatcgcgatccgcatcgcctcgacctggaccatccaccagtcggccgcggtggtcgacatcgcctatcacgtgtcgggcgcgaccgcggtattcgcgaaaaatccgttcgagcgacggtttcgcgacatgcacgcgatcgcacagcagatccaggcccgcgacacgcagtatgaagacgccggcaaggcaatcctgtcgggcaatctcgcagccccgcccacggcgcgctgaggcgcgatgaaatcggattgaaccggagcgcgcgctcatctgccatgtcggccctgcccctaaatccgaacatcgccgggtgcgcacggactacgcagggaggtgcgctatgagccgcgcaatcgagctgtccttctcggataaggctgacagcttcaaggtctggatcttcgcggaggacttgagccgcgaactcgaaaggtcagagctgggatttctgcctatgactgaggccgatgctgtgacgaacttcctgcgaattcgggagataaaagcgagcaagctgaaaaggtgcgtcgaacttgtcgataaacttgtcgacaaacactacatgcgtgagcacgtgaccattcagcaaaggaagacggactgagtgagcgcttccgcttcaggtcattttcgaaccatatcagcaagcgtagcccggaagagcgaagcgacatccgggaccggcacgcagatcgcaagatcaatcccgcatatcgcttcgctcacgcgggctactcactaggcggctgcgcacgtattcggcctcgtggttcgagacgcaccgcaagcggcgctcctcaccatgagggtctactaccatgccgcaaatccagacctcatcctgaggagcccgccaaaggcgggcgtctcgaaggatggccacaggaacgctcctcaccgatttctcccatacgcgattgccctgccgcttgcagggagcggcgaagcgagtctgccgtccgattgaggcaaccggactcatctcgactcagccgcatggtacgaaagtaggccccggcgacgctggtccgggcacgaatttcggcggcgcaacatacggttgttaagctttttctgagaccttcccggcggcgcaaatgcctggagttccgctggtcccatgttcaagcttcgatcgattgccgctcgcctgattctggcgatttcactgaccgtcgcggtcgcctgcgccatcctcggcggcttctcgatcagccagcagcgtgcgctgacccggctcgcgctcgatcagcagctcaagctgcaatatgacagcgtgatcgccgccatcgactatgaaggccgcaccgcgcttgcggtctccgccgtcatcgctgccctgccgccggtcgaagaggcgatcgccaagggcgaccgcgatgggctcggcaagctgctcggcgccccctgggcggcgatcaaggcgcagggcatcccgctgatctcgttctggcaggccccggcgacgagcttctaccggatccacaccccgaaaatcttcggcgacgacgcctccacacggcgcatcaccgtggtggaatcgatcaaggccggcagaccgatcgtcggcgtcgagcccgcccgcgaggcgctttcgatcttcggcatgaccccggtcatgcgtgacggcaagacgctgggcaatgtcgatatcggcgtcgccttcggcaaggaattcgtcgaccgcgccaagaagcgcttcggcatcgacctcgccgtgcattcgttcgacggccagaacttcaagcggctgtcgtccaccttcggcgacagcgtggtcgcgaccccggacgagctcaagagcgtgatgaacggcgcggccgtgctgcgcgacgccgttctcgacggccatgcggtggagctctatctcggccagatcaagaactatgccggcgagcccgtcgccgtgctcgagatcatcaaggacaccagcgactatgccgccgctgcggcgagcgcgcaacgcaatctgatcctcggcgtggtcgcgatcctggccgccgccatattgctcgcgttcctgctcggccgcggcctgtcgcggccgctcaccgcgatcaccgccatcatgaaccggctgtccagcggcgacaccgacgtcaccatccccggcagcgagcgccgcgacgagctcggcacgatggcgaaggccgtcgatgtgttccgccgcagcatgatcgagacctcgtcgctgcgcgacgcgcaggaggccgacaaggtgaaggccgcggccgacaagcaggcgctgcagcggcagatggccgaccgcttcgaagccgacgtcaagggcatggtcgccgccgtcgcgcgctcgtcgggcgacatgcagcgcgtcgcaggcgagatcacggccagcgtcaacggcacctcggaacggacttccgcggcagccgccgcatccgaggaggcgtcggccagcgtcaacgcggtcgccgcggcgaccgaggagctggcgtcgtcgatcaccgagatcggccgccaggtcacccattccagccgcgtcgccgacagcgcggtcgccaaggctgcggagaccaccgagatggtgacgagccttgccgcatccgcggagaagatcggcgacgtgctgcgcctgatcagcgcgatcgcgagccagaccaatctcctggcgctcaacgccaccatcgaggccgcgcgtgccggcgaggccggccgcggcttcgccgtggttgccgccgaggtgaagggattggcgagccagaccgcgaaggcgaccgacgagatcgccggccaggtcggtgcgatccagtccgccaccggcaattgcgtcagcgcgatcggcgacatcagcggcaccatccgcgagatctccggcatcgccaccgcgatcgcggccgccgtcgagcagcaggactcggcgacccgggagatcgcccgcagcgtgcagcaggcctcctccggcaccgtcgaggtctccgccaatatcgcaggcgcgagcgaggccgccggccagtcccgcgcgctcaccggcaacgtgctggatacatcaggccagctcggcgaccacgccgccgcgctgtcgcacagcgtcgacacgttcctcgccggactgcgcaacgcggcctgaccggtggggctgcgctatgtgacgtacagggcactgtggtagatagacgccacacgccctcgcggagcctctccatgcgcaagccggcaacatcgaccagcaaggcggcagggcgtgcgcaagcaagatcggcagatgcgctgttcggcgcctaccctgcccccgtcaaagccaagctgctggcgttgcggcggctgatcttcgagaccgcgaaggcgaccaaaggcgtcggggcgctggaagagacgctgaaatggggccagccgagctatttgacgccggagaccggcagcggcagcacggtccggatcgatcaggtgaagccggccgccgatcaggtcgcgctgtacttccactgccagaccaatctggtcgagaccttccgcgagctctatcccgagctcagctacagcggcaaccgcgcgatcctgctcgatgtcggaggcaagctgccggaggcggcgttgcgccactgcattgggctggcgctgacgtatcatttgcggcggaaggcgagccccaacgagtgatctcgcagggcgggcaaaggaggcagcgacgtgcccaccattcacgtggtgctcaccatggtgggcgcccacgccttgttcaccctgcaaggtcggcttcgccagcacgactgagaaataatcgtcgtcccggcgaaggccgggacccatacgccgcggcggatgttgtgaatgggactcgtcattccggcggcgcgcaacgaccggcatttggggttatgggtcccggccttcgccgggacgacgctgaatttgtggcacgatccagcgcaacgacgttgtggcagcttcctacgccaccagcgccgtggcgacccgctgcgccttcaagaggctgatgacctcggcgttcggccgggcgcggctgaacaggaagccctggccctcgtggcagccctcggcgcgcaggcagctcagctccgcctcggtctcgacgccctcggcggtgatggtgacgccgagcccgacgccgaggctgacgatcgaccgcacgatcgcctgcgcgtccgggttggcgccgaggtcgcgcacgaaggactggtcgatcttgatcttgtcgaacgggaagctgcgcagatagctgaggctggaatagccggtgccgaaatcgtccatcgacatccgcaccccgagcgcgcgcagcgcgtgcagcgtcgccagcacctggctgctcttctcgagcagcagcgtctcggtgatctcgagctcgagccgccgcgccggcaggccggattgccgcaaggcatcggtgaccagcgccagcagattgccggtgcggaattgcagcggcgacagattgaccgcgacgcgcacgtcgtcgggccattgcgcggcgtccatgcaggcacgatgcagcatcaagctgcccaacggattgatcaggccggtctcctcggccaccgggatgaactctccgggcgagatcatgccgcgttccggatgcggccagcgcaccagcgcctcgagcccggtgatgcgtccgctgctgagatcgaccagcggctggtagtacggctgcaggccttcgttctggatcgcatcgcgcaggtcgatctcgatcttgcggcggctctgggcgcgcgcatccatctcggcctcgaagaacgagaaggtgccgcggaaatcgctcttggcgcgcgacagcgccatgtcggcgctcttcagcagcttttcggaatcctcgccgtcgccgggcgacatcgcgatcccgatgctggcgccgatcaccaccgaatgcccctcgagcagatagggctcgctgatcgcatccaggatccgccgcgccagcagcacggcgtcctcgggccgcatcacgccgccctgcacgatggtgaattcgtcggagttgagacgggccagcgcatcttcctcgcgcagcgtcgagcgcagacgcttggcgacggcgcgcagcagcttgtcgccgatgccgtggccgagcgtctcgttgaccgccttgaaattgtcgagccccagcatcagcaccgcgaccttgtcggtcgagcggcgggtatgctgcagcatctcgtccatctgctggcgcagcaggttacggttgggcaggccggtcaggctgtcgtgctgggccatgaaggccagccgcgcctcggcgcgcttgcgctcggtgatgtccatcagcgcgagcagcatcgccggctggtcgccgtgcatcagctggcgcgaatagatcgcaaggtcgatcagcgtgccgtccgcgcgcacatgcttccaggtccgcgccgcctgctcgtcgctgctgcggccggcggcccagggcaattcggcgtcgaacgcctgaaggctcttgatcgtcatcttctcgaactcggcacgcacataaccataatgcgcgatcgcggcgtcgttgaccgcgaggatccgttcgccgtcgagcgcgcacaggatcatcggcaccggattgccgtcgaacagcaggcggaacgacgcctcgcgctgtttcagttcggtgatgtcgacacgcaggccgacgatgccgccatcagaggtcaaccgctcctcgatcaggaccacacggccatcggccaggacctgctcgtgccgctcgcccggctggtacatcttctgcagtcgctcggcgatccactcttcctcgcgcccggcggcctcgggatagtcgccgcgcgcgacgccgatgcggatggtgtcttcgaggcgcgcaccgcgctcgaacaggtcggagctgcgcttgtagatttccgagtatttcctgttccagagggtgtaacggccttcggggtcgaggaacacgatgccttgcggcaggatgtcgatcgcctcacgcaggcgcgcgttcgacttgcgcgcctcggcgatcgccgcctcggcctgcgcgcgctggcgcaccagttcaccgatctcgaccgcgggacggcgtgaacggcccgacattttcggcaccggcttggaccggcggcccggcgggaccgacagtttggcctgctttggtttcttgatcttcttcggccgcatcatcggcatcgcacgccccacgcgcattccagttcggcgacatttctgcgataagtctctgaaaaattggtatctcttgacgaatagctgcgcgcgttgagaagccgcagcatgcctgcttaggaggcgagttcgtgccgggagcgacttgctgccggtatgcaagtgacgcacggcgcggatttgcggcgtggcagagccggcgcgtggtgaaggaagcgtaaatccacgcgcggctgcacaatgaatgcaccgaaagtgcctcgagcgctcgaatgtttgccaatgtgtgacagggttatcgcagggttaaggcagcacccaagcggcgacttccgattgcgggctatagcggtttgaccatgcggatcgtctccgaacgaaaaccaccgcgctcatagaaatcaatcgcgcgccgattgtcggcgaacacatcgagactgaggaaccgatacttcatgtcgcgcgcccaatcctcggcgtggctcatcaacagtttcgcgatgccctgcccctccgcctcctccgtgagggcaaggatcgcgacgtagccacatgcctcgtcggtgacgccatcctttccgggctgcatatggatgtagcccaaccgcacatcatcgtccgacacggcgatgagcgtccgggagttttcgacggcctggttcacggtggcggccatgtagcggtcttgaaactgttccatcgcttccaagccatgccacgcgggaccggggacgcctgaaagacgcggagagagcgcggacagaaagtcgcggtctgatcgggttgcctctctcactcgaaccgaacctgtgtcaatcggcatttcattctcccaccatggctctcacgaaagccagagcaactacagcagatcgccgcaggcaagctcaatccgccctgtgggcgatcaagcaaatgggatgggagtgcggttcgtctgccacgaatccgtgctagccttgcgtggacagagtgatccaaatgacatcctgcctgcgtctgatcccgctcctgatctccgccctcgtcgcctgcaccatctccgcgcgggcgcaggacaagggctcgctcaatccgcagccattgccgccgctcgccaaccccaacgatccgacgatcggagcgaagcagctgttcgcacgcaaggtgctgccggcagcgatgccgacgagatcgatcggcggctacaccaagggctgtctcgccggcgccgcacagatgccgctcaacggcgacacctggcaggtgatgcgcctgtcgcgcaaccgctattggggccatcccgacatgatcgcgctgttgaagcggctggccgccaacgcgcacagggacgccggctggcccggcatcctggtcggcgatatcggccagccgcgcggcggcccggcgctgtccggtcacgccagccaccagatcgggctcgacgccgacatctggctgacgccgatgcccgatcgcaaattgtcgcgcgaggatcgcgaggagatgtcggccgtcatgatggtgcgcgacgaccggctcgatatcgatccgcgcgtgttcacatcaggtcatgtgctggtcatccgcgacgcggcgcgcgagccggcggtgcagcggatcttcgtcaatccggcgatcaaaaaggcgctgtgccgtgaggccaagggcgaccgcagctggctgtcgaagatccggccgtggtggggccacgactaccacttccacatccgcatgcgatgtccggccggcagccccgcctgcgagggacagaagccgcaggcggagggcgaaggctgcaagccgtccgatctcgccttctggttcaaggattcggtgctgcatccgaagccgccgccgaagccgccgaaaccgcgcccgccgatgacgctggcgcagatgccggcggactgcaggacggtgctgaacgcagccgacgccaagcagtgacatccaagcaataacatcttcgtcaggcggctatgccggccggctggaagtacgttatgatcccgcgtcgtcgcgccgtaagcgcgatcgagccatggatcgcggcgccgatctgtttcatccgtcataattgcattggatcagacatgcgcaaatcgctcatcgccgcatcgctgctgctcgtctcggctcccgccttcgcggcagaggagccgagcggttgcgacaagttcaaatggtcgatcgaccgcgcccgcgccgcgctcaccgcgccggatcgcgccaagcttgcctcgggcagcgaacaggcggcgctgccgccgaccgccatcacgctggcgctggttgctcctaccgatgccaaattgccctcgccgccggagcgcgcgccgaaggacggcaccttcgccggtttcaccagtttcaaggccgcgccaaaggccgggctctataccgtcagcctctcggccggcgcctgggtcgacctggtgcaggacgggcatgtcctgaagccgaaggcgttcagcggcgcgaccgattgcgacggcatccgcaagaccatgaaatacgacctcgccgccagcccgttcgtgctgcaggtcagcggctcaaaggagaacgcgctgtcgatcgcgatccagccgtcgagtgaataggacgatccgttcgacaaagagtggctttaccgtaagccccagcctgctatgttttccgagcgatatccccgaggaccgtaagtccgtcggggacccgcggaacagcgcttccgtgcgtcgcgcccagacctcattgaacgcctgatttgcgcgcgctcgcttgcgcgcgatctcgcacggagcgcttccatgccacgactttccgtttcaaggctcgccggccttctcactgccttcgtcatcctgctcggcgcgatcgattcgccggtgcgcgccgaggacaagacgctcaccgtcttcgccgccgcctcgatgaagaacgcgctcgacgagatcgatgcggcctataccgccaagaccggcgtcaagatcagcgccagctatgcggcgagctcggcattggcgaagcagatcgagcagggcgcgccggccgacgtgttcgtctccgccgacaccgactggatggactatgcggtcaagcagaagaacatcaacgagccgacgcgggtcaatctgctcggcaactcgatcgtgctgatcgcgccgaaggattccaggatcgacaacgtcaacatcggacccggcttcgacctcgccaagctcgccggtgacggcagaatcgccaccggcgacgtcaaggcggtgccggtcggcaaatatgccaaggccgcgctggagaagctcggcgcctggcaggccgccgagccgaaattcgcgatggccgagagcgtgcgcgcggcgttgacgctggtggcgcgtggcgaggccgtgctcggcatcgtctattcgaccgacgccaaggtcgagcccggcgtcaaggtcgtcggcaccttcccggccgacacccatccggcgatcatctatccggtggcggcgaccacgactgcaaagcccgagacatcagactatctcgtcttcctgcgctcgtccgcggcgaagacgatcctcgagaaatacggcttcaagttcctgatcagtccgacgacctgatgttcgagatctcgccgaccgaatggacggcgatcctgctgtcgctgcgggtcgccgtcatcgcaacgctggtggcgaccccgttcgggattgcgctcgcctggctgctggcgcggcgcgatttctggggcaagtcgctgctcgatgccgccgtgcacctgccgttggtgctgccgccggtcgtcaccggctacctgctgttgctgacgttcggcaagcgcggactggtcggcggctggctcgccgatcatctcggcatcgtgttcgcgttccgctggaccggcgcggcgctcgcctgcggcgtgatgtcgtttccgctgctggtgcggccgatccgcctgtcgatcgaagccgtcgaccgccgcctcgagcaggccgccgagacgctcggcgccgcgccgtggcgggtgttcgcgacggtgacgctgccgctggcgctgccgggcgtgctggccggcatggtgctcggcttcgccaaggcgatcggcgagttcggcgcgaccatcaccttcgtctccaacatacccggcgagacccagaccatctcgtcggcaatctattcgctgatccagacgcctgacggcgataccgccgcggcacggctcgtgatcgtctcgatcgtgatcgcgatgggcgcgctgatcggggccgaagtgtttgcacgccgcgccaccgcgcgcctgcacgggcaataaccatgctgcgcgtcgacattcaaaagcagctcggcgagttctcgctcgcggcagcgttcgccagcgagggccgcgtcaccggcttgttcggcgcatccggctccggcaagacgtcgctgatcaacaccatcgcggggctgctgcgtccagatcgcggcaccatcatgatcgacggcgagacggtcgacgataccgcttccggcattcatgtgccgacctggcgccgccgcatcggctacgtgttccaggacgcgcggctgtttccgcatctcgatatcaggcagaatctcgactacggccgccgcatgaacggcctcactgaagaccccgcgcagcacaagcgcgtcgtcgatttgctcgacatcggcgccctgctcgaccgccgccccggcaagctctccggcggtgagcggcagcgcgtcgcgctcggccgggcgctgctgtccaagccgcggctcttgctgctcgacgagccgctgggtgcgctcgacgaaagccgcaagctcgagatcctgccctatctggtgcgcctgcgcgacgaggccggcgtcccgatggtctatgtcagccacgacgcggccgagctgcgccagctcgccacccagatcgtgatgctgcgccgcggccaggtcaccgcgttcggcggtgttaaggtgttgacggcgggcgggtagctggccgtttttccgaaactcggcataagatagcccatcttgtctgctaggcccgcgtcggggcatcccgatcaggcatggggaaaggtgcatcgtgcgactgactggctgggtattgctgctgatcggcgggctgctatgcgccacgatttcgtgggcagcgctcggcttcctgctgatgggcatcggcctgatctcgctgcaggtcgccgagcgtcggcgacgccgcgaggatcgtgccgtgccggccgggaccacaggatttacccctccgcgtctcagcccggggctgcagccgcccaccctcgacccggtcgccggccaggacaccgggccccaacgtcagccccgccgggtggcctggccggacaagaagggggaggcgccctatgatcggcaggcctggcgccggctggtcgaaagcgatcccgatctcgcccagatcgccaaggtgctgtccgattacggcccgcaatatgtcgacgagctcgcgaccagctatctggccgcgcccgacaagagccgcctctcggccatcgtcgacggcatcatcgcgcgagcccggggcggccagccggccccgccgcccgcgccggtcgaaggatcgcggccaccgcccttgccgccccggccggagcctcaggcgcccgctcctgccgccaagccgacggcttcgccgagcaatcctgccgatgcgctggaagcatccctgctcgccacggtcgaggaggctaccgccaggatcgccgccgaacgcgccggtctcttcaagcctgccaaggacaaggccagcgacagccggtcgtcgacggcgagccagcgggagccgctgttcggtcgtgccccccgggacgcgaagcccgccgagccaccaccaatgccggctgcacgaccggccatgccgatggagacatccgccaacctcgaagcgtcgccgatcgccgccgtcagcgaggccgccaccaggcgggcggacacaaccagcccggcggccgcgaagacagcgcctgcgaagacagctgcggacaatctcgacgagacgctgctcgcagcgctggccgagatttccggccaaaagctcaagggcgagtccaagccggacgccgcctccaaggacccgccggccgacgacgggctgtccgacatggtcaagaaattcgcgccggattcgaacttcctgcgcaagcagtgacggcgacctaaagcgcgataagattgggttgaatcgtcatcgcgcctcagttgcttgtttgtgcatgatcttgtcggaaaaccgcttcgcacttttccggatcatgctctaaacccccgccaccgacgcccagatgtcggcgagcttacgccgcacggtctgcatccgcgtctgcggcacgaccacctcatcctcctccggcaggcgcaggccgacgacgttgacgcggccgccgctgatgctgcgcgccaccagcacgatctcatcgagcgcaagctcggccccttccttcggcgcgcggtcgagattgatgtcgaaataatccgcgagcgtcagcttggcggcgttctcgtcgaccttgacaccgtagatctcggcgagctcgccgagcgtatgctcacccgacaccatgaagtcgccgagcagatgcggatcgggcgcactcgacggcgccatgtcgacgaagaagcggtcgagcgcctcggcgcgctccggcggcgccagcagatagatgtagtcgccgggcgcgaccggatcggcctcgacgggcgtcaggatgcgttcctcgcggatcaccagcgtcggcttcgaccaggatgggatcagcccgcgacggaaatacaggctcttcggccgcaccggatagccgaccaattgctgctcgagctggccgggcagatccagttcgacgcggcgcgggccgcgttcggcgcgcggcagcgcgacatgcagacggcgcgccgccggcgccagggtccagccctgcaacaatagcgagatgatgacgacgacgaaggcgacgtcgaaatacagataggccttcgacaggccgaccagcatcgggatcgaggcgaggaagatcgcgaccgcgccgcgcaggccggtccaggcgatgaagaccttctcgcgccaattgaacttgaacggcgcgaggcagatcagaaccgccagcgggcgcgccaccagcatcagcgcgaatgccaccagcaccgcgccgccggcgctggagagcaggcgatgcggcgacaccaagaggcccagcagcacgaacatcacgatctgggccagccaggtcgcggcgtcgaggaaggtcaccaccgaattatgcgcgcgcgtcggccgattgccgatgatgataccggcgaggtagaccgcgaggaatccggaggcatgcacgatctgcgagccgccaaagatcaccagcgccgccgtggtgacgaacggcgcatgcaggccctgcggcagcgccacatagtttagtgcgatcaccaccagccggccgccgatcaccccgatgatggcgccgaacacggcctcctggatgaactccatcgcgatgtgcgacgccgagctctggccgaccgaaatgaactcgaccagcatcaaggtgaggaagatcgcaaacggatcgttggtgccggattccgcttccagggtggcgccgacgcgggggcgcagccgcaggccctgggtatgcaccaggaggaacaccgccgcggcgtcggtcgaagccacgacggcgccgaccaagagcgactcggtccagttgaggtcgagcacatagcgggcgaccggcgccgtgatcagcgcggtcagcagcacgccggcggtcgccagcatcatcgagggcgccagcacggtgcgaatgctggcaaaccgcgtcttcaacccgccgtcgaacaggatcagcgccagcgccaccgagccgaccagataggtggttcggacgtcgtcgaactggagatggcccggcccggcatcgcccgccagcatgccgaccagcaagaacaccagcagcaggggggcgccgaaccgcaacgccagcaggctggacaggatgccggccatcaccagcaccgcgccgagcaggatcgctatactgacggagtcgagggatgccatgcgccttcggaagtctcaaatacttgcaattgcatccttatcgtcgccacactgggacgccaaccgatttctgccgtcagcggcaatccgcccgccttgccctaggtcaccccgacactgtggtgtatcgatggtcgggtgagcgccgttgcgggattctcccctcgcattcgaatcacatttgcctgacccgcgcttcaagttgagactttgccgatggacatgagctggaaggacatcctggaatcgatccaattggcggcgcgctcggtcggcgccgaggtcgcctcgccgtggttctatctgcagttcggcatcatcctcgccgccgctggcctcgcctatgccgccgataccgccattcatgcgcgggtcaacatggcgacactggcgagccgctggccgctgccgctccggcacttcgcccgcgtgatggtatcgagcgcctcgacggcggtgttcgcggtgttgatggtgatctcgcgcatcgtgatgtggcacgcgacctggccgagccgcagctatctgatcgcggtttccgccaagctggcgctggcctggctcgtgatccgcctcgtgacctcggtgatcgacaatgccttcatcgtcaaactggtctcgatcgcggcctgggtggtcgccgcgctcagcatcgtcggccagctcgactgggcggccgatacgctggattcgttcgccgtcgtggtcggcggcctgcgcctgacgccactgctgctgatcaaggccggcgcgctgctgatcgtggcactgtggctgagcaatatcgccagcaatttcatcgacggccagatcacgcgctcgaccgacctgaccccgtcgatccaggtgttgctggtcaagatcattcgcatcggcctgatggtgatcgcggtcgccattgcgttgagcgcggtcggcatcaacctgtcggcgcttgcggtgctgtccggcgcggtcggcgtcggcatcggtttcggcctgcagaagatcgtcgccaacttcatctcgggcatcattctgctggtcgacaaatcggtgaagccgggcgacctcgtcaccatcggcgacagccagggccgtatcagtgcgatgaagacccgctacatctcggtcgccgccggcgacggccgcgagttcctgatcccgaacgaggacctggtgacacagaaggtcaccaactggacctacaccgacaagaatacgctggtgaagatcgccttcgccgccaactacgacgccgatccgaggctggtctgcaagctcgcgatcgataccgcgacggcccacgcccgagcgctcaagggcaagccgccgaactgcatcctgaccgaattcgccgaactcggcatgaagttctcgctgaccttctggatcgccgatcccgatggcatggacggtgtgaagagcgacgtcatgctgtcgctgtgggacgccttcaagcaacaaggcatcaaggtgccctacccggtgcgggaactccgcatccgcggcggcgcgctgccggtcgagagcgtggtcgaggtctccagttaaagctcggcaagagccgagctggaacggcgtcggaagttcacctctccctttgggagaggtcgatttgcgaagcaaatcgggtgaggggttgcggcctaacgagagagcaggtgccctcacccggattgcttcgcaatccgacctctccctgacggggagaggtgaaccgaggccacgccaagccgattcagctagactcatcgcgctttggcggttcaagtgtggcttgttttgggatggcggccgccgccgttccggttcaagctgggaaatcaagccgtttcgacattgtccccatgcccaagcttggcttgcgccgggcgcgccgatcattaaattagagcctgaaatcagcctcttgcccgcagaaacatcccgcccatgagctatatcgacgccaccgacacctcgcttcgcaagaccggacagatcaagctgcacggaccgagcggctttgccggcatgcgcaaggcgggtgcgctggtgtcgaaatgcctcgatgcgctgaccgacatcgtcaagccgggcgttccgacctccgagatcgacgagttcgtccgcaagttcgccttcgaccacggcgcctatccggcgacgctgatgtatcgcggctatcgctactcgacctgcacctcgatcaatcatgtggtctgccacggcatgccgggcgaccgcccgctgaaggaaggcgacatcgtcaatgtcgacgtcaccttcatcgtcgacggctggtacggcgactcgagccgcatgtatgcgatcggcgcgatcgcgcggaaggcggagcggctgatcgaggtgacctatgaagcgatgatgcgcggcatcgccgcggtgaagcccggcgccacgacaggcgatatcggccacgccatccagagcttcgtcgaaccgcagggcatgagcgtggtgcgcgacttctgcggccatggcctcggccgcctgttccacgacgagccgaacatcatccatatcggccgccccggcgaaggcgcgccgctgaagcccggcatgttcttcaccatcgagccgatgatcaatctcggcaagccgcatgtgaagatcctgtccgacggctggaccgcggtgacccgcgaccgctcgctgtcagcccagttcgagcactcggtcggcgtcaccgccgacggcgtcgagatcttcacgctgtccgaacgccatggcgagaagccgtgggttcaggtgtaacggccacgcttcgcatctcagtcacgctccgtcgcaagatagatcagcgcgcataacggcagagtagcgccgatcgcggtcgcgagcatccagccgcccacggcataggcccaggcgccgaccgccgagcccgccgcaccggcgaggaagaacgtcgccatatagagtccgttgagccggctgcgcgcttcggcgcccagcacgaacagcgaccggaagccgagcacgacgttggcctgcacgccgaaatcgatcgcgatcgcgccggcaacgaacaaggccagcgagagcgtcgaacccggccgaccgagcgaagtgagcaggaagccgccgctggtcagcaacatcgcccctgccgtcgccggacgggtccagccgcgatccgcgacgcgtcccgcgatcggcgcggccacggcgccggcgacacccagaagcgcgaagatcgcgatgccggattgcgacaggcgataggcggggccggcaaggaccagcggcaccgtggtccagaacaagctgaagacgccgaacaggctggcctgatagagcgcgcgccgccgcagcgccggggtattgcggacgaggtgcaccatcgagctcagcaacgtgcgatagccgagcctggtgcgcggaacgcgcggcggcaaagtcctgcgcagcagcaacgcgagcagcaccatcagcgccgacgacatccagtagaccacgtgccaggacgacgccgaggcgatgaagctcgacgccggtcgggacagcatgacgccgatcatcaacccgctcgtgacgttgccgaccacttgccccctgatgcgctcgggcgcgagatggcccgcatagggaatcaggatctgcacggcgaccgaagagaaaccgaccgacagcgccgcggcgaagaactgcaacggatgccgcgaaagcgccgccgcggccaacgcgaccgctgcgaccgcgatcgtggtcgtgaccagccggcggttttcgatcagatcgccgagcggcacgatcagcagcaatcccgcgccgtagcctagctgcgtcatggtcacgagcaggccggcatgctccggctgcagaccaagctcggtcgcgatcggtccggccagcggctgggcgtagtagatgttggcaaccaccagcccgcaggacagcgccagcaggaaggtgagccaggtcgagaccgaatccggctcgggccgggtatcggatgtgatcgtcgtcatggggtctccaatttgggaatattcatttcctaaatagccaaaccaaaaatcacccgaccagtcgcatcgcgacctcgaccgcagccggcgtatccgccggcgcacgaccggagcgtccgacgacgcgcaggccctgggtgagacacaccatcatgcgcgccgtgtcctccgcatcgatgccgtccacgatcgatccgtccgcctgcccttgccggatcaggtcagccaggaacgcctcgttgcgcgccaatgtcgcgccgacccgcacggcgacttcgcggtccgcgatggccagttcgacggcgctgccgacaatcatgcagccgcgccgtccctcgatccctttcgccgactcgacataaaagccgagcacggcgcgcagccgctcgcgtgccgatccctgcgttcgggcaaccgacgcaatctgctcgttgcgcaggcgcatgtagcgatcgagtgcggccaggaataccgcccgcttgtccttgaacgccttgtagatgctgccggaggccagccccatccccgccgccagatcctcgatcgaggtggcgttgtagccgtgttcgcgaaacacccggatcgccttgtcgagcgcgacgtcgacgtcgaattcccgcggccgcccgcgtgggcgccgcgcctgctccgacaatctggccatcgtcctcatgctcccatttaggaaaagatcattccctaaatcaattcacatctttgtgcgctgcaagatcaataatcgccgcgtgcgccgctcgatctcctcgggcgtgtggttgtcgccgatcgacatcgcgcagatccgcgacaggtgcagatagggcaacccggtctcttccgcccaggcgttgaactgcgcctgcaccttggcaagatcgcgcttcgacttgacctcctcggcaatatccacgcctgcatcgcgcaggcaggccgcgacgtcgcgcgaggtgacaaaaccgtcccagccgaggaaacgcagcagcatctgcccggtgttgccgccgagccggctgccgcgcttggcgagcagctccagcagcccgatctcgttcgatgacggccatgcgctaaggaacctgccgaagctgccgtgctcgcgcgcgatctcctgcacgaagcggccattgtcgcgcaccgacatgatcttggcgccgttgcgcacgatcctggcgtcgctcgtgagcttctcccagaattcatcgggcctgaaggcgagcttggtcggctggaagccgaagaaggcttcctcgaagcccggccatttggcgtcgatcacgctccaggcaaaacccgcgcagaacacgcgtctggtcatttcagccagcacgcggtcgtcgccgagcttggccagtgccttggcgcccgccggcgggtgcagcagcttctccagcgccttcggtccgcccttgcgcttttcggcacgcgcgcggatcaccttgaatgacgtcacgccgccctcctcctttcgatctcgctgcaggcaacggtaattcgctcgccgcgcggtggcaaatctcgacagcatcagcccttgcaaaacgcggcaggcacggcaaggttgtggccgatgcccgccaagcccgatgccagcaccggagagcccgacgagacgccgcactatcacggccaccgcgaacggctgcgcgagcgcttctacgcggcggggcccgacgcgctgaccgactatgagctcttggagatggcgctgttcgccgccatcccacgccgcgacaccaagcccttggccaaggcgctgctgaagaaattcggctcgttcgccgaggtggtgcacgcgccggtggcgcggctgcgcgaggtcgagggcgtcaaggatgcctcgatcaaccagctcaagctgctcgccgccgccgccgggcggatcgccaagggcgagatcaagcgcagcatcgcgctgtcgtcgtggaacgacgtgatcgcctattgccgcaccagcatggcgttcgccgacaaggagcagttccgcctgctgttcctcgacaagcgcaaccagctgatcgccgacgaggtgcagcagaccggcaccgtcgatcacaccccggtctatccgcgcgaggtgatcaagcgcgcgctggaattgtccgcgaccgcgctgatcctggtgcacaaccatccctccggcgatccgacgccgtcgcaggccgacatccagatgacgaaagcgatcgtcgacatcgccaagccgctcgggatcgccgtgcatgaccacatcatcgtcggcaagaacgggcataccagcttcaagggcatgaaattgatgtagtcttgcggcgttgagatacgtcacacaccggggcgcctccacggagacagatgatgtcgaaaggtcccagcgcggctctcacttccgacgagattggtgcgatggcacgcgacgccatcgcagagggacaggcggaccgcaagcaggcggcatcgcagaaaattcaaccgctgcgagaggcccagcgtcaccagccggaggcggcgatggcgctggtatggattgtcgaccagcacagcctcgcaagggacgaggcggcaggtctgctgctggagatcgcggatgcccatgatgacgatatcggtgtcctctcggcgcttggacaatgcctcgaagcggtgcgcgacatcgacgatctgaacgcgccgccgccggaccacccgatcttccggaccatggtcgagaagctgggccgcctggcgaagctccatgaggggccgcgtgaacaggaatggatcctgcgcgggctcgccacggccgcgcgaatgatggcgcgccagaacgatgcaatcgccgagcattgtcttcgcaagctggtcgaaatcgatccgcgcaagagcccgccgcactacaatctgggcctcttctacaagacacgcggcaggttcgcggaaggcgtggcggccaaccaggccgccgcaagcctgtcgcaagaggtgatcgacagccaccagtggaatctcgggatctgcgctacgggcgccgggaacgcggagatcgctatggatgtgtggaagcggatgggccagaaaatcgagcctggacgattcgggttgccagaaggcggatatccggcctgcaaggtgaagctcgccgagcggccgcttgccgagcgggccgcggactcagacgatccgggccaggaggaaacggtgtggatcgaacggctgagtccgtgccacggcatcatccgcagcgtgctgtacggcaagctcggcgtcgactatggcgatgtcatcctgacggatggcgccccgattacgcatcacacctatggcgagcagcagatcccggtcttcccgcatctcgcgacgctgctgcgtcgaaactaccggttcttcgatttcgccggcacgcaggagaccgcacggcaattggccgacatcaccgacgagctggacggggacgccgtgatctattcgcactcggagggcttcaagatcatgtgcgcgaattgctggcgcaacccggatatcgatcacgccgatcacgagcaaatggagacgcacgtcgtcgtcggccgcattgccgcgcctcccgacatcgcgcctgcgcgacttttgcacctgatcgacaccgccatcgagaagcgggcaacctgccagctctacgcgcccgatctttgcgcggcggccggacaagcggcgcgcgagcggatcgaccgacgccggtttgcgctgttggcgaacaattaggcacgccgcggtcctggtgaatgccggacgacggtgaaacagcttgttcggcgtcaccacctgcgcatgcgggcgatccggtattccagaggcgccagtgcttgaggggagaggacgtggctgctcccgtcattccggggcatcgcaaagcgatgagcccggaatccattgggccgcaaaccaaacggtggaatggattccgggctcgacgctgcgcgtcgccccggaatgacgatggagagaacgatcgcgccgacacgccgagcatccccccacgtcatacagccatcggctcttcccgctaacatcgcccatgcaacgttttccgcgcggcggcgtttgttgcaggttgatttgtcagctccagactttgggggaccgatgtccgactatgtcattgaggaaggactaccctacccgttgggcgcccattggagtggccacggcaccaactttgcggtgttctccgccaacgccaccaaggtcgaggtctgcctgttcgacggtgagcgtgagacgcaccgcttcgagctgcccgaatataccgaccaggtgtttcacggcttcatcaacggcgtgcaaccgggcacgtactacggctatcgcgtctacggcccgtaccagcccgacggtggccaccgcttcaatccgaacaagctgctgctcgatccctacgcctgcgcccatgccggcgggctcacctggaatccggccgtgttcggctacaagatggagaccggcgacgacttgaccttcgacgagcgcgacagcgccccgttcatgccgaaatgcgtggtggtcgaccccaatttcgactgggtgcaggaggcccagcgccaggacgtgcattgggacgaaaccgtggtctacgagacccacgtcaagggttttaccaggcagcatccgggcgtccccgaaaacctgcgcggcacctatgccggcttcggctcggacgccgcgatcgatcacctgaaggcgctcggcatcacctcggtcgagctgctgccggtgcattccttcatcaacgacagcaacctgctggacaagcacctcaccaactactggggctacaacacgatcggcttcttcgcgccggacccgcgctacgccgccgacgtcgccaacagcctgcgcgaattcaaggagatggtgtcgcggctgcatggcgccgggctcgaggtgattctcgatgtggtctacaaccacaccgccgaaggcaatgaacgcggcccgacgctgtcgttcaagggcatcgacaatgcgagctattatcgcctgctgcccgacaagcggcgctactacatcaacgacaccggcaccggcaacacggtaaacctgtcgcatccgcgggtgatccagctggtgatggacagcctgcgctactgggccggccacatgcatgtcgacggcttccgcttcgacctcggcaccatccttgcgcgcgaggtctacggcttcgacgagcagtccggcttcctgaaggctgtcaaccaggacccgctgctcgccaccgtcaagctgatcgccgagccctgggactgcggccccggcggctaccaggtcggcggcttcccgccgggctgggcagagtggaacgacaaataccgcaacaccgtgcgcgacttctggcgcgcggaggcaacaccggccgcgctggcgccgcggctgctcggctcgcatgacgtgttcaaccgcgaaggccgccgcacctgggccagcgtcaacttcgtcaccgcccatgacggcttcacgctgaacgactgggcgagctacgacgccaagcacaatgaggccaacggcgagcacaacaacgacggctcgtcggacaaccactcctggaattgcggcgccgagggcccgactgataaccccgagatccggactttacgcgaacgccagaagcgcaacatgctggcgacgctgctcgcctcgcagggcacgccgatgctgctcggcggcgacgagttcggccgcacccagcgcggcaacaacaacgcttattgccaggacaacgacatctcctggctcgactggaatttctccgacgacgccgaaaagctgctcgccttcaccaaacgaatgatcaaactgcggcgcgactatccgatcctgcgccggagccgcttcctctccggcgatcgcgatccgcagctcgagatccgcgatgtggtctggatcaacgcctcgggcgccgagatgtcgcaaggcgactggaccaccggctggatcaagtgcttcggcgtcgtgctcgacggccgcgcccgcaagaccgcgatcgcccgccagggcgaggacgacaccgtgctcgtcatcctcaacagctatgaaggcgaggtcgacttcaagctgccgccgaccacggcaggcccgcattggtcgctgctgctcgacaccaatgcgccggagcaagccgcgggtgcgcagttcgcgttcgagagcacctacaaggcggccgggcgttcgttcgtcctgctgacggccggcgaggtgaagtagggacgggcgcaactgcccaccctcgtcattccggggctcgcgaagcgagagcccggaatccattcatcggcagaatcggcggcccgatggattccgggctcgtgctgagcctgtcatcgggcgcgcgttcgcgcgacccgttggcacgccccggaatgacggaaggagcacgtctccccaaagggccccctccccgcgaccccggcggccaattgacattcgctcgccgagtgccagacttcgcggaaaattaggggtggagaccgctggatggccaatctttcggcctcaaatcatgtcgcccgtgtcttgtcagcggccaaccaggtggccggcgtcgataccgaggcgcggattgcggcgtcctggcggcgctgcgtggtcaatcacaacctcgatccggcgcggcgcgggccgccgcagaccctgaccgaagccgaggtccggcacattgccgagccgatggaggatttgatccaggtcgcgatcccggaactcgaggatcttgcccgcgtgctccatgacgccggctactgcgtcaacctcgccgaccccaacgccaccatgctggtgagccgcctgcccggaggcgactacgaccggatgttcctggaatggaagatctacaccggctcgaacttcgccgagaccttcgagggcaccaacgggctcggcaccgcgctcgccgagcagcggccgatcatcgtgcatggcgacgagcattttcgcgagcagtggcacatgttcacctgcgcggtgtcgccgctgttcgatcatgcgggccggctcgccggcgccgtcaacatctcctcatgccgcagcgatctcggccgcagcgcgcatgaactggcgctcgccgtcaccacggaagcgacgcggcggatcgagcagtcgttcttccgccggcgctaccgcgcctcctggatcgcaaccctgcccgacgacgggcatggcatgctggcctatgacgacgaccgccgcgtggtcggcgcctgccgcaccgcgcgcggcatgttcggcctgaccgacgcgatgatcgacgacggcatcgacctgtcgcatctgattcaactggacgaccgcgcgacacgcgccgcggatgatccggtcacgctgcgccgggccgacggcacgccctggggccgcggccgcctcgcaccgccggtacgcgtacgctcgccgcgtccgatgcctgcaccgccgcgccaacaaccggccggacagttcagcggcctgcaccggctggccggccgcgatcccgtgctgatgaagggtgtgaagcggctgatgacggtcggcaatctcgatctgccgatcctgctgcatggcgagaccggcgccggcaaggacgtgttcgcgcgcgccatccacgcggccagcaatcgcgcggcccgcaactatgtcgcgctgaactgcgcggcgatgccggagagcctgatcgacgccgagctgttcggctacgaggccggcgcgttcaccggcgcgcggcgcgagggatcgagggggctgatcgtgcaggccagcggcggcacgctgttcctcgacgagatcggcgacatgccgctgacgctgcagacgcggctgctgcgcgtgctggagaaccgcgaggtctggccgctcggcgcgctgaagcctgtcccggtcgacatccgcctgatcagcgccacgcaccgtgacctggcgcggatggccgaggacggcagcttccgctccgacctgtattaccggctgcgcggcatggagatccgcctgcccgccttgcgtgagcgcgcggatcggcgcgaggtgatcgcacagatcgccgacgaggaagccccacactgccgcatcgcgccagatgcatgggcgcaactgatggcctatcccttccccggcaacatgcgccagcttcgccacgtgctgcggctcgccggcgcgacctccgaggacggcgtcatcaccgaggccgatctcgatctgccgtctttcgccgcgcgcgacgtgaccgccgatcataccgcggccgagcgcgccgcgattgtcgaggcgttacgcaccaatggcggccgcgtgacggaaacggcgaaagcgctcaagctcagccgcgcgacactgtaccggaagatcaaggcgctgaagatcgcgctggacggttaaagcgggatgagatttggttgaatcgtcatcgcgctttagccctttgtctgagcatgatcttttcggaaaaccgcttcgcacttttccggatcatgctttagatgacggctcgttgccgcggcatgtttcgacatggcatgccggtcgcgaatggaaggatggtctgacgtgaaggaaactcaccacgaagggctgggcgcggaaggatatggcgtggccaccgtcgcggacaatggcactgtccttgacacctggttcccggcgcccaggcgcggcaatccggccggcccatcagggtcaacggttctcacagccgagcaggcccgcgctgccctggatccgagagcagcggcgtgtctgcacgctgacgcccgccgtgccgtttccgtgatcccggtcaagaccgtcatcgatgatctggcgcaacccccacatgatgcccatgacgtctatctgcggcttcatctgctgagtcaccgcctgatccggccgcacggcgccaatctggatggactgttcggtatcctcgcaaatgttgcctggacgtcgatggggccatgcttgcccgagcagattgaagcgcttcgctgggccgctcgcgcatcatcctccaccctggacgtccgcagcatcgacaagctgccacggatgaccgactacgtggcgccggacggcatccgtatcgccgatgccaatcgcgtgcgactgggtgcctatctcggccgcggaacgaccgtgctccatgaggggttctgcaacttcaacgccgggactttggggacctcgatggtggagggacgcatcagtgcgggcgtcgtggttggcgacggcacggatgtgggtggcggcgcatcgatcatgggcaccctttcaggtggcggcaagcaggtcgtgtcgatcggcgagcgctgtctgctcggcgccaattccggcaccggcatcgcgcttggcgacgattgtattgtcgaggccggttgctacgtcaccgccggcacgctcgtccgccagcgatcgggagaggtcgtcaaggcgctcgagctatccggcaagcctaatatcctgtttcgacgccactcgcagacaggggcgatcgaagcgatccctcgcaacacatcctggggcagcctgaacccagcccttcatgccgtcacttgagagcagtgaaaacgaagctggcccgacataggcggacgcagccgtagcgccaacggcgaacgacgacggaggtgacaggccgcggcacgccgtttcaggaaaactcgttccagctcacgcgccgcgcgtcgacgtcgccgagcgtgatcggatcgtggatgttgcggacgctctggaagcccgagcgcaggtagatcaacggatcgaccgcggtcgcggcgcggacatgctggacctcgccgatgaagatcgagtgggtcttggtttccagctcctggctcaggacgcagtcgaacgccgcgacggcatcctccagcaccggggcgccggtcgcgccggtggtccagcgcccgaacgcaaagcgatcgtcgccgttgacgcccttctggccggagaaggtcagcgccagcagcgcgtgctcctcgttcaggaagttgatgacgaaatggcgctcctcgcggatgcgcgcgtgcgcgctggcattgcggttgacgcagaccagaaccgagggcggattgtccgacagcgagcaggccgaggtcaccgtcaggccggtgcgctgcccggtctccgagccgaccgtcaccagcgcgaccgcgccggcgcaatggcgcatcgcctgcttgaaactctgtgcgtcgaccgtcatgtcgcaacctcagtactgaaatatatttcctccaacatatgccaggcggggtgcgaggcaagccccgcaccccgcctagctgtcatgcggccttctcgaactcggcgccgagatgcttcagccgcggcattacctcgttcttgagcaggtccagcgagtgccgccaggcctccggcttgtgcttgtagtcgaagccgaacacacagagcacgccgaagccgccgacctcccggtagatctgctcgatcttctcggtgaccgtcttgggcgagccgac

SEQ ID NO: 13 - DNA, 172171 bp, Bradyrhizobium enterica
  misc_feature (121387)..(121396): n is a, c, g, or t
gtcgagcgacagcagcttcttgtccttcaggctctccggcacgtcgccgttgaggatggcggtcttgccgacaccgggctcgccgatcaggacgggattgttcttggtgcggcgcgacagcacctggatggtgcggcggatttcctcgtcgcggccgatcaccgggtcgagcttgccgtcgcgcgcagcctgcgtgaggtcgcgggcatatttcttcagcgcatcataggcgttctcggccgtcgcgctgtctgcggtgcgacccttgcgcaacgcttcaatcgccgcattcaggttctgtgcgttaactccacccttggccagcaactggccggcctcgctgttcctgtctatggcaaggccgagcagaagacgctcgaccgtgacaaagctgtctccggccttctcggctgccttttcagcggcgtcgaaggctcgcgcgagttcgggtgcaagataaacctgcccggcaccgtcgccggaaaccttcgccaccttgttcagggcatcctcggtcgccttcaggattgcacgggaattgccgccggcgcggtcgatcagaccgccggcaaggccttcgctgtcatcaagcaggaccttcagcagatgcagggttgaaaactgctggtgcccctcgcgcatcgccagcgactgcgcggattggatgaagccgcgggagcgctcggtatattgttcaatattcatcgtcgtcttccctcggcctgccgctccgaccccgacgtacgatcaccaaaaaagagcgtaccactcttgcgctcgatcgcggtcaaggtattgggtccacgagtcgccaaccgcacgccattaagcgaatgatccgcatacgggatagtcgtcgggtttccgcgagctcgcactgacgtttgtcaactcgccaagcggctttcatcgcctgcgttgacgcatgctacgacagagaacgttcaatgtcgtcgcctttgagcgcgcactccgtccaccggcacaagtcaatagagagaccttccgcattggggcagcacgcattttgaagcaacgcaaaagcgtatcgccgatctttctgggcggcatcgctcgagaattcgcgcgcgatattgcgtcgtgattggctcatgcggtgcggcgtgctgaagttgacggttgtcatggcgctcattgcgtcgtggtgtcatgagagtggtatgaggccttcgaaatcgaccggctgttctgcgcgcaacggtcattacaggagttcgagccatggcgaaatcatccatcacggacgcaggggtcagacttcgcatcaacggctccgagcatctgctgcagatcgagccgcgggtcacgctgttggatgcgttgcgtgaatatacgcacctctatggtaccaagaaaggatgcgatcagggccagtgcggcgcctgcacggttcacgtcgatggacggcgcgtcctcgcttgcctgacgcttgcgtcccaggtcgaagggctggcgattaccacaatcgagggtttggcggtcaacggcagcctgcacccggtgcaggaagcgttcatccgccacgatgccttccagtgcggatactgcacgcccggtcagatcatgtcggctgtcgcctgtattaacgaaggccgaaccgtctcggacacgagcatccgcgaatatatgtccggcaatctgtgccgttgtggcgcctatccgcacattgtcgcagctgtgcgcgatgcggcgcaggcgatcgattctgcagaggggcgaggacgatgaacaatttcgaatatgttcgggccaccgctattcccgacgcgctgagggccgttgccgatcaggctggctcccgcttcctcgctggcggtaccaccatggtcgacctcatgaaatgcggggtggaggttcctgctgcgctcatcgacattacgcgcttgccgggcctcgataccatcgaggctggtccggcgcgcgtgcggattggcgctctctcaagaatgagcgatgtcgccgatcatccgataatccggaaggagtttccggttttgtcggaatcgctgtggcgcggcgcctcggcccaactgcgcaacatggccacgatcggtggcaatctcatgcagcggacacgctgcagctatttccgggagccggcggtctatggcgcctgcaacaaacgcgatcccggttcgggctgcgctgcactcgagggcgtcaaccgcgggcatgcggtcttgggcacgagtccaagctgcatcgctaccaaccccggcgactttgcagttgctctcgttgccttcgacgccgctgtttacgtcgagaatggcaagccacaacgtcccgttccgatcgatgacttcttcctcttgcccggcgacacgcccgatgttgagcacccgctcacgtccggtgagttgatcgtcgcggtcgagattccgacctccgccgcgctgcgccgctcgcattacctcaaggtgcgcgaccgcgagtcgtacgagtttgcggccgcaagcgccgctgtcggcctggaactcgaagcggacggtcgcaccgtccgtgacgtcaggatcgcgctcggcggtatcgccacgaagccgtggcgggctcgtgccgtcgaagcggcgcttgtcggacgtactttcgacgaagcgactgtgcgggccgcaagtcgcctggccaccgagggtgccgtcgaccatggcgaaagccgcttcaagatcgaattggctccccgcgtcgtcgcgcgtgcgctactgaccgttggagggatcgcctgatggctgtcaacgagtctgaatcgctgaagagcaacggaacgtttctcggacgtcgcatcgcgcgggttgatggcgtcgcgaaagttaccgggcaagccgactacgctctcgaacacaatctggcaggcgttgtccatgctgtgattgtcgagagcaccgtgccgtcggggcgcatcgggaagatcgatcttgccgtggcccggacgatgccgggtgtgctgcggatcttgacccatgccgatgccctgccgctcaagagctgtcccatggttccagcaggtagcgtcatggagagcttcttgccgctccaggacgctcgcatccggtacaacggtcaacccattgccctcgtggtcgccgatagcttcgaacatgcgacggaggctgcgggccgcgtgcggatcgactacgagaccgaactggccgtcgccgacatcgatgatccagcggctacatcgatcgacgtccccggggcgccgtcgtcgggtccggcccggggcgacgcaaagggtgcgctcgcggcggcagcggtgcgcatggacgtcgtctacaccacgccgcgcgaatattcctgtccgatggaaccgcttggagcaatcgcaacctgggacgatgacggcgccctgaccgtttggatgccgagccaatgggcacagggcgcacgaagggcattctccgaatggtttgccattccgatggagaaggtgcgcgtcatttcaccgttcgtgggcggcggcttcggggtcaaggtcacagctcacgccgactcgctgctcgcggcgatggctgctcgcgaaatgcgacgacccgtcaagctggcgttgtcgcgtccgcagaacttcaccggcaacggcttgcggcccgcgatacggcagaagctgacgctcggtgcgagcgaggacggaaagctgcaggtgctcattcacgagaacaccagtgagacctccgtcgatgacgattatgtcgagggtggcgcggccaccgccagggtcatgtatgccgtgccgaacctgagttcgactcagaaactggtgcgggtcagttcctttactccaagttggaagcgcgcgcccggagaagcgatcggtgcctatgcgctcgaaagcgcaatggatgaacttgcctacaagctcaaactcgatccgatcgaattgcggctgcgcaactatgccagtcaggaccctgaatcggcgaaaccctggtcgacccgccggctccgcgaagcctatgaagccggcgcgcgggcatttggctgggagcgacgctcgctggagccgcgttcgatgcgggatggccgcgaattgatcggatggggcatggcgggaggagcgtttccgaacgtgcacacgcccggcgaggcgagggtcacgattgccgccgatggttcggtccatgttgcatcgagcggcccggacatcgggggcggtacctacaccatccttgctcagacggcagccgacgcgctcggcgtgtcgttcgagcaggtgcgcgttcgtctcggcgacaccagcctgccccgcgcaccggtggccggcgtttcacagattgccaatcttctcaccggcgccgtggataagaccgcccgcgccgcccgcgaggagctgttgacgctcgcgtccagtcatgctggttcaccgttcaaggccaagcgcgtgaacgacttcacgatcaaggatggaatgatcgcgccaacggatggctccgccgacgccgtcacgatcgtcgagctgatgcgaatggtcggtcgcgatcggatcgaggtcacgcgcaacaccatgccggccgacaaggcatcgtccgaaacagagcagcgcgacgcctacgatagcttcaaatatatgggcccgccgtcagcgacccacgcgacttatgcatggtgtgcgcaattcgtggaggttcgtgtcgacgaggactatggaaccgtgcgtgtccgccggatgctcggagctttcgattgcggcaggctgtacaatccgaggctcgcggaaagtcagtggaagggtggcatgatcatgggaatgggagaagcgcttctcgaagccatacacatcgatcgccgctattcgcgaatcaccaacaacaaccttgccgaatacgtcgtgccggtgaatgccgacgtgcctgatatcgaggtcatttcagtcggcgagccggactttcacgccagcgcccttggcggcaagacagttggtgaaatcggcgtcgtcggcgccgccgctgctatcgccaatgccgtattccatgccaccggcaagcgggtgcgcgagctgccgatcacgatggagaagctgatgtaggtgcgcgatcggccgacgttcaggaccaggccgacaatctcggagtcacgaacgtcgcgacgacgatcttgcgcgtccgcgcgcgacggatggggctagtgccatgtcgacgcataatctccgatccctgactggccgacgccgcgtctgggcccgattccccgatattactgtggttccgtaacctatgcccttagaggccggctttcgtatgtggatccccctgatcgccaagataggcgttgaccgacgcgacagcgacgacgttgcgctgcagaaaatgatactcgtcagcgttgtgttgacatccgccgtcgcagcagcactgtggggtctcgtttatattggcgtcggagcacgggccgccggcagcattcccgcggcgtatagcgcattgtcgctggccaacacctttctgttcggcatgtttcgccgctaccaggtctatcggttcacccagctggcgctgatcctgcttctgccttggctgatgacgataagtctcggcggcttccacaattcaagtgccgtaatcctttggtccacgctttgtcctttgggcgcccttgtcgtccatgatcttcgaaccgcctcccgttggttctgggccttcctcgtcctgctcgccagcagcgcgctcctgcaatcctccgacggctctgcctccctgtctttgtcgatggtcactttcttctacatactgaatattggttgcgtcctgagtattgcctttgcgatgctttactatttcgtcgacaagaaaaacaggttccaggcacgatccgaaatgctgctgttgaatatcttgccaatcgagatctccaacatactgaaaggtgagtaccgcacgatcgccgatcagtacgacgcggcgagtatcttattcgccgatgtggtgcagtttaccccgctggctcggtccatgtcgcccatggaactggtcgggctgctcgacgaggtcttcatgtgcttcgacttgctggtcgataaatatcagttggagaagatcaagacgatcggcgactgctatatggtggtcgccggcgtgccgcgcccgcgtgccgaccatgcccacgctctggcgcgcctggcgctcgagatgcaagcttgtgtggccgcgcgtgatttcggcggcaggcgattgacattccgcatcggcatgaactcaggcccggtagtggccgggatcatcggccggaagaagttcatctatgatctgtggggcgatgctgtgaacatggccagtcgtatggaatcttacggccagagcgaagccattcagatcacacacgcaacttacgaactgatcaaggatgacttcgtctgcgaaacgcgcgggacgatagacgtcaagggatcgggcgaaatggagatctggcatattctaggtgaaagacccaacgaccaagaatacttgccggggatggcagcttgatgaaagagaacgccgattccgccgatgcgttcgcttttgatagtttgacaagcgcgcgccactcaattcttctacctatgggacgatcccgttcgccgacactgacatcggtcaatgcagcgcgcgcttgcccgcgatacaagttcctgagatcgcaattgatttgatactcgcgacgacgacaacaggagagtagaatgacaaaattcgcgctgtacgttccgcttgtggccaagcccggcaaggagaaagaggtcgcggactttctgcggtcggcggttccactggtgaacgccgaacccgggacgatctcatggtatgccattcaggaagggccctcctccttcgcgatcttcgataccttcgacgacgaggtcggacgcgacgcgcacctcaatggaaaggtcgctgccgccttgatggagaagatcaaggcgggcgacatgttcgacaacacaccggaaattcataaactggatatcatcgcggacaagtcggcggggtaagggtgtggtggtcgtttgggtagccgtccgagggcagcgcgcacgcgcgtggcttactgaggtgccgcgaggcgattggacgttgatgcgtcggccgcgagccgggccctgaacctcgacaggtacggcgcggttcggcttttggacgatccagcgacctcggcaggggtgccaaacgccaccacacgaccgccttcgtcacctgcccctgggccgatatccatgacccagtcgctgccggcagcaacgcgcatatcatgctccaccacgatgactgtgttgccggcttcgaccagcccgtcgagttgggcgatgagcttctcgacatcagccgggtgtagtcccgtggtgggctcgtcaaggacgtagagcgtttggccgcgctgcgttcgctgcagctcggtggcaagtttgatccgctgggcttcgccgccggaaagctctgtcgcgggctggccaagtcttagatagccgaggccaacctgtcgtagcacatcgagggatcggcgtacctgcgcctcctcggcaaagaacgcgaaggcggtatcgaccgtcattccgaggaccgcggctatgttcttgtcgcggtattttatttcaagggttttggcgttgtagcgagcgccatgacagcttggacacggcgcatacacgctgggcaggaacagcaattcgacgcaaacaaagccttcgccctcgcaggtctcgcagcggcctttggcgacattgaaggaaaagcgtccagcgtcgtagcggcgggcgcgcgccgacttggtggctgcaaagatcttgcgaacgtgatcgaacagccctgtatacgtcgcgaggttggaccgcggagtgcggccgatcgccttttggtcgacgaccaccaatcgcgagacaccttccattccgctcgcgatccagccaccgagcgtggtcacgacggtccgctcgagctcgtcgccttcatcgtcgatcgacggcagcgcatggcctagcgtgtttgcaatcaattccaccagggcctggctcaccaggctcgatttgcccgagccggacacgccagtcacggtcgtgaatacccccaacggaaaatcgacatcaaggtcgtggagattgttgcgactgacgccacgcaatcgcaaccagcccttcggcgagcgcggcgtgcggcctgacacgatgtcgtcgccgaacaggtaacggcgggtttgcgaaccttcgacctgcttgaacccttgtagcggaccgctgtagagcacctggccgccaagttcgccggcgccaggcccgacgtcgacaacccaatccgcatggcggatcacatcgatctcgtgttcgaccacaaacagcgaattgccggaggctttcaatcgggcaagcgccgtcaaaagcgcctcggtatccgcgggatgaagtccggcggacggctcgtcgagcacatagacgacgccgaacagattggagcgcacttgggttgccagtcgtaggcgctgcagttcgcccggagagagcgtcggggtactccgctccagcgaaagatagcctagtccgaggtcaagcagaaccgtgaggcggccgccgaagtcctcggcgatccgctgcaccaccatcgccttctccggatgctgcgccttaagcttggtcagggtcggagcggtggcctccgcatagggacgcaggaggtcggcgagccttgccagcggaatcctgcagatgtcggcaatatcgagtccggcgaacttgacggacagcgattcgcgacgaagccgcttgccacggcagagcgggcattcggtgcttaccatgtagcgcgatacccgcttcttgatcgacgcactttcggtggtggcaaaggtgttcagcacatatcgcctggcgctggagaaattgcctcggtaactgggctcctccttgcgtttgatcgcccttcgcgcctcgtctgcatcatacccgatataaaccggaaccaccggttgctcgtcggtatacaggatccagtcgcgagctttcttcggcaattctcgccatggacgatcgacgtcgtaaccgagcgaagtcagcatgtcgcgcaggttgccgccatgccaggcgggcggccaggctgcaatcgcgcgctcacgaatgcttttggaatcatccggcaccatcgagcgttcggttacctcgtagacccgaccgagcccatggcatcggggacaggctcccgccggcgtattggtcgaaaacgcctcggcatcgagatgcgcctgttgccgtggatagtcgccggcgcgcgagtacagcattcgaagcaggttggacagcgtcgtgacgctgccgacggacgagcgcgtggtgggcgacccgcgttgctgctgcaaggcaacggccggcggcaagccatcgatttcatcaacctcgggaaccgccatctgatgaaagagacgccgcgcataaggcgagacggattcgagataccgccgctgcgcctccgcatagagcgttccaaaggccagcgacgatttgcccgagccggacacaccggtaaacaccaccagggcatcgcggggaatggcgagatcgatattctccaaattatgctcgcgtgctccacgcacgcggacgaaacctcgcagctcctcgcccgctgctccctgagaacgaggcttgttgatttctagcatcgggcgaaacgcctgagcgccgagtggagttccgtcgcaaacgggggtttgatcatcatcgcctccgtcctgccgccgggactacaaggagggttgatccggcgaggcctcttgtcattgacgatcgtcaggaagcgagggctgctctcgacaaacaagaacttgaggcttcgtcgagttatgcccgataggattggtttggtccggttcgcgactgcacctctcggataaaatcctgcgggctcgagaagaacgagttctcaatcaggaccccaccaatgacgaccataggatgcgttcgcaaaatatcgactgcaagcggtgtggtcagcaggttaatgtcgtaagtgcagatcacgggatcgtcgtagtttggcaaaacctcattgaggcgcatctcgtattcaacccatttattgccgctactccagtcgtccacgaccgtttcggcgtgcgcgatcagccgcgtcaacgggaagccgaactcggcgccggccttcaatgcctcctggatcacgacgatcatgtcgtccatgttgaagcgtccggtcctgagataagtgctttccaacggctcgacttcgagctggcggcttttaatcgcgttctccacgtcgatgccggcgctgcgcaaccaattgaggtgatcctccctgtgctgagacgggaggatatgatgcgcgcgttggccgcagttgataccgtcgcagatgaacggcaccaaagcgtcgtattcctccactgccgaactgaagaacgcgcagacatggcggtgctcccgaagcatggatcgtccaaaaggaatgggcttggcagttgaattcatgtcagcctcccgtttgagggtcctttggggcctgcttgccgtgaaagtgctggcccggcaccaggcgctctcgttgttccagggtgttcgcgacctggacggcgagccgatccagtggagcatgatcgtactcgctctcgatctgcggttcgcggaagtgcgtcgtgaaaacgccccagaggcggccattgctgctgatgagcggcgtcgattgtacggcagcaataccatcggcacgcagtacatcgagttcgcgcgtgcccacaaacaggtagctcgtcgatacgtcctcaacaaatacccgcatgcgccgcgtgagcgcggcagcgcatgtggtgttattgtcgcggcgtacgacactgaaaaatgtcaggactttgccggaaagtccgcggctggcagcaattgtcaggcagtcggctttttcgtcgaatcgctgcagcgtacccatgtcggcgtgggttattccgatcgcgatatcgacgacccgcagcaggtctgcaccgacatcctgggaatctctcagccgctgcaggacggcgtcgatttgttgtccagttgcagcgtcgagcggctccttgaggtttgccatcgccttcgcttccgcggaccgtaccgcggcaatattgtcgcggccaaatgaaatgtaagagaggatgatggcgaagcagattaggtaattctacgtaatcatttgcactgtgcgtgccggcggaatccgacggtaaccaaggcgcgttgcccgatatcttcctggtcagtcccccgcgtgaccgccccaatcccgtccagttgagcttttcaagaaggattcatatggccagcatgcgttcgtagtgacgcttgaccgttgcatggcactcgcaactaccctccaataattgctccacatccaagagccggatattgccgcgcttgtattgaatgaatccggccttttgcagggtcccggccacaactgacacgctggtgcgccgcacgcctaacatctgcgcgaggaactcctgcgtcagcatcaactcctcagaacctgtcaggtcgcgcatgcgcaacagccagcgacacatgcgagcttcgaccgagtggcttgcgttacaggcagccgactgctgcacctgagcgagcagcacctgctcatgacgaatgagaatggcgtgtaaaggttcatattctttggcgagctgtcgcagagcgttcgggtggatcgccgccgcctcaccggcaacttggacaatgcctctatggagcgcagtcctgccgtcaagcgcggacgtgccgttgaccaccccgtcgcgtcctaccatcgccgtttcgatcatttcgcctacgctcatatcgacgaccagcgacaccactccgctgaaggggaagtacacttgtgtgatcgactgatcggtttcggcgaccacctctgcaaaggacagcttcaccggcttgaggtggagctttatggccgcaaagaccttttgcgggagtgcgttgagaattcggttgggggactgagacatgacgaggctccctctgccgtttcggcgggagcgcaggagcgtctctcagtcactgaagccatcaattgctcagtaatgagggatattagctccgctggaacaaaatagccagccttagtttgataaccgacagacggctccgtgacaaaccgagtaaaaacggtcatccaggctgagcttcggtatgcgttgtggattggatcaggcgaaatgccttgggtcgatgagctgtccgagccgcaagaactcaggcgctgcatccgcgatctcgtcgcgctttcgacgctgccggcaatctggaaggactacgatacgcggcagatcgccgacagcgtggcagccgcaatgctttcgatgctcaatgccgacgtcatttgcgtgtctgtaccgggactgcgcgacgaggctgcggccgaagtagtgcgcacgagccaaacggtgtcctcccggccatctggtcacgttgaacgcatcctccgcggtgcgtggcgcggaagccgcgagcagatatccgcgatcgacaacccgctcgggaggggcacattacggatcgcggctgcgccgatgggctttggcggcaacgccaggatcgttgcaggttccctcaatccgcaatttccgagcgaaacacaccggcttcttctcggaattgcggcgaaccaggcaacgctcgccatgcaacgccggcaggcggaggcggagcaacggcgcctggtgagcgtgattgagcggtcgtccgagttcattggtttcgccgatctagagggcacgccgcaatacgtcaataaggcggccttggacctcctcgggctttctgacactgaggaagtgcagcgactgagcatcttcgatttcatggccccccatgagcggactcgggcgcttcacgaggcgcttccaatggtgatgggaaccgggcgttggctcggagaactcgacttccgccacttcaaaacaggggagatcattccattcctggtcgattggttccgcatcgacgacaagcgcacgggccatcctacgaacatggcgactgtcagccgcgatttgaggcctcagaaacagctggagggtgatcttcgacgcctcaacgagtcgttggagcagcgggtgaccgaacggacatcggaattggcggaagcgctcgaacgactgacgctcgaagccgaggagcggcggtgcgcggatgtccgcgcgcagcagctccaagcggagcttcatcatgcctcgcggctaagtgcagcgggtcagatggccgcggcgttggcacatgaattgaaccagccgctgaccgcggtcactaatttggtcaacgccgggcgccggatgatggcaagcgacgcaccccacagggtcgacactgtgcgcggtgtcctgggccaagccgccgagcaagcgctccgcgccggtgagatcattcgccggctgcgagagttcgttacccacggcgcgacggagatgcgcatcgaaaacctgccggagctgatccgtgaagccagtgatcttgcctcagcgggaaacggcccgcaccgcgtgcacgtccggctgaacttcgatccgcgcgccgaggtagtgtttgcaaacagaattcagctgcagcaggtcatggtcaacctgatacgcaatgcgcacgaggcgatggtgcagagcgagtggcgcgagttggaagtggtaaccgcgcgtctcggtgacaagtggattgagatcactgttgcggatcgtggctcgggcctgccggacaatattgtcgaacacctcttcaagccattccacaccacaaaagtcgatggcatggggctgggactttcgatctgccgctcgatcgtcgaggcccatcgcggaaagctgggatatgagcccaattgcggcggcggggcgatctttcgcgtgacgctgcccgtcccgccgtaacgatgaggcgatcgatggctgccgaacggttcatttacattgttgatgacgacccggcgatccgccgatctctggagcgcctgatggatgcggtcggcttccaggtggcgtcgtatgcaacgccaaaagcgttcctcgacgtcgcgggcagcttgctcgggggctgcgtcctgctggatcttcgtatgccggagatggacggcttcgaggttcatgctcgccttcgatcgataaacccggacttgccagttattgtagtgacggctcaaggtgatgtgcagaccgcggtccgagcgatgaaggcgggagccgtggacttcattgaaaagccctacggcgacgacgccctgatagcggcgattgagtccgcactgaagaccagcgcagcgagaggccggaccgatgatatcgccatggcggcggagttgatcaacacgctccgtccccgcgagcggcaggttcttgaggctctcgtggcggggcagcaaaacaaggtcatcgccttcaatcttggtatcagtgtgcgcacggtcgaggttcaccgctcacgtatgatggaccggttgggcgtgcatcagttcgccgaggctgtccggcttttggtgctggcgagctttgcagagcgggtgtgagcggatgtctggtgttctggagatgcccgccacagcacatcgtcatgcttgacatcctcaagcgctttcgcgcgcttccatcacgaccggccaaccaacggttgcgggatatgtgcggggagctccttcagcagcaggagtgcgaggcctacatcgttccggccggcgaaagtcgcgacggccgcacgattttccgtcgaaggggagaaagtctattcagggccaaagttgagcgttaggatcgcacagggggaggccgtgccttccacacactctgcggcaagcgatgaccgacttcggcgagctgggcaaatgtccgttttgctcgccctaaagtacgattcggaaaagtgcgaagcggttttccgaaaagatcatgcgcaaacaaagggctaaagcgcgatgacgattcaaccaaatctcatcgcgctttagtatcgtattctacgacgggtccctgattggcatgtacccttggatcaaggcgccgtactgaatgggtgaagctacggaaacaaagagaaggcgcactgccatctggccgcgaggccctgaatggagaaacgtcgcacgagacccttgctgttctcggcaacttcccccgtaagcaattgacgaagaagcctttcgcaatgttgggcgcaccagggctcgaacctgggacccgctgaataagagttcaaaaacaccgaagcctctctgcgatttctgagtctgcgctacactacgatgaagtcgagaaaggtcttttatttacagagactcgtcgcacagcttcgcagcaaagcgaaccctgaccttcaaacagctcagttcgccaaaaccgtttgaaaaccggtttagcagttcacgtcgaccctcatgaccgacattcgcactgctctcagcgataaggccatcgctcagctgccgactcctgaagacggctggtatctggctcgcgacaccgagttgaaaggcttcttcgtggtagtcgggaagcgaaaaaggaccttcactgttcaaggtgatctcagtcaacgaggaaagcgggcctcctccgtcagagtatcgattggtgacgccagcgagttgaccacctagggcgagtggtggaaccgctgtgcggcacgcctgcgcccatgctcacgcgcaaaagcggcagccgtgcagccggcgtatagacgatagcgtcgcgtgaaatggcttggtcggaaaacccggtaatcagcgccacttcgaccaaaggcaaatcacgatcatggatcaaggtctgggcgcgacgaacccggcactgttccacgaaactcatcgcagtgacgccagtgcttagtttgaacaggcgcgcaaaatgggagacgcttagcttgattggctcccctaagttgtcttcgacatataccgcgatcttcatcaactcgggggaactcagcgtagatccggtcgatgcggcgataccgagcgaaccgcgcgggcgcagtgaggtcggcaatcgggtgcctctgcaggctagccgaaatcggatctgaccactcgcagtccagcggtgggacatgtattgtcattgaccgcgttccggttgtcggttgtgaaagcttggccggcttgccagccaagcttcagcgtcttcgacacggatcagcgttctccgtccgacctgatcgctggaaggcgatcggcacccatttcccggtaagcgatggttcgaccgacagaatagattcggcagaactctagagaagaggtttatgaatttgcatggggctgcgccaaagaagggcgacctgaacccgcagccgtcgcggtgatctgccttgcatggctgcaacggccggagaacgtattggccgggtttttgacgtggccggactaccgcagcaagaactggccaaacgctgtacgcatcgagcaccacaagaataaagcgctggtctggcatccgctcgaagagactctcgatggtgagaccatcaagttttatgccgaagcggaggacgttttgagtcatctgctaaagcttggcgtcccgatgattatgcgtcggatccaaaagggtgaatgcaagggcgatgccaaagtgtggtcctaccctggcatggaaaagtagtgcagcagatgcgcaagaagatcgacggcgtgtcaaagctgttcacgcttgattcctgtcgacacggcggcatgaccaaactcgaggaagcggagctgacagacggccaaggtcgtgcgctctcgggccacaagaccgcacaggcctatcgcggctatgccaaggagacgatgatgcgagcgttggctgcgacccgcaagtggcacgcacatctcttggcacagaaggaactcgatcagcagaatgctgatggagcagcatcacctcgagacgaagcgcagacctccccaatttcgaaggcttgcgcccgatctcaaggatagacttcgcgcttcgttgaacgctacaaaacacggcgggttctgcaaccgtcgatcccgcacgcggcgtcgacggctgcggtcggaaacttgcaacgcgcagtcatccgctcaattagtattttgacaagttgagcgacgttcaacgcgcgacaatcccttcgaccaaaaacgaaaccagcacagaattgcaaacggaatttccaaatgcgcgagaaatgccgccttgagcaaggctattttcacaacaaaatccagtatcttgtatatggctgggggcgcagtgctgatcgcagccgtctccgggcaatttccctgcaaacagggaatttttcagggaatttcgcgatttttccccttcgcgaagatattaacgacgagaactccctgtgccggaggcgtttattcgcggattccctgatcaagcgaacagggaaaaagccgttcgagaacagggaattccctattaaacaacagcatcggctgcagcatgagccgttccggcaatgtctgggacaatgcggcgatggagagcttcttctcatcgctcaagaccgaacggaccgccaacaagatctacaggaccagagatgaggcacgatccgatgtgttcgactacatcgaaagattctacaacacgacccgcaggcactcgaccatcggttatctcagcccagttgagttcgagcgcaggggggcattagcttaacccggcgtccatcaagccggcagcagctcaaagccccaaatccacttttgaggctgtggttcaccaatatagctgggttcgctgcatcgcccagtcccactgcatcggaagctctgcttttctgtcgcagagcaacttaacccggaacgtgatgtttccgataacgcgccggcacggttgctaaaattccattcctttcccgccgccacgatttcgacgtcaatcgcctgacctgaatacagcatagcgtgcttgacctcgcgcggccgcttggaagcgtcattgcgtctgcgccctgcgaaatccagcgatacccgtcttcgctactattctcccgggccgcagttggcctggacgtttgcgtttcaatttgagcgcttccgccagcatgggagccgatccacgtcgaggatcggctcacagagcgccttcgtctttagacgacttcgcaacgccgcgggcctatacggtccaaagctcgtgaagttgcggaccgcgcttatagcaagcccttcatggaccatctggtgaagttgcgcggggtccgggtctcgccatgccgagcgcttttcgtcacgacttagtccttcaaccgcgtaagccgcggccgccataccccgagaacgatgttggccatcgctatggctagaaacacccaaagcgaagcgcgacgcgtccccaattcgccggctagcgtaacgggatcgatttcgccggccaacgctcgcgcactttgctccgcttcctgctgaagcggcccaaccacggagacaaaaccccattcgaaaacaagaacgcccgttgcgagttttgcccatgcccaaccggcgttgtggaaggccctgttcgcagcgatggccaacaatccggccaccagagtgagcccaagagagggcataaatatccaggtcgccactgcacccgtcgcgacgctgagcgatgcgtactgcgcgatcgagtccggtgcgggcgcacagcctgccatgacaagaaagcacgcaaccgcgccgacgacgccgatcgctcccatcgtatgaagaaacttcatcaacttccgcatgatcgaccggggttcgaaagaattgcctatcgtgccatcgacggaccccgatcgcctggatcagtcgcccaagaacagcagatcaagctgccttggcgagcccaacctccgcccagatctctgcaagggcattcaccaaatgctcgatgtcggcatcagtgtgatgcggcgacggcgtgatgcgcaaccgctcagtgccgcgcggcacggtcgggtagttgatcggctgcacataaatgccgtagcgctcgatcagcacatcgctgatctgcttgcacaagacagggtcgcagaccatcaccgggacgatgtggctgggattgtccaggtgagcaacccctgcctcatcgagccgcctgcgcagccgcgcgacgcgatcctgatgccgctctcgttccgccgcgctcgatttcagatgacggatgctggtaagcgcgccagcagcgaccgccggcggtagcgacgtggtgaagatgaagccagaggcgaagctgcggatgaaatcacagatcgtggccgacgccgcgacgtagccgccgatgacaccgaacgcctttgccagggtgccttcgatcacggtcaggcggtggtttacgccttcccggtcggcgacgccaccgcccttcggtccatagagaccgacgccgtgcacctcgtcgagataggtcatggcattgtgggcgtccgcgacgtcacaaagttcggcaatcggcgcaatgtcgccatccatcgaatagacggactcgaaggccaccagcttgggcgcatgcgggtcgagatcgccgagcttgcgctcgagatcgcgcgggtcgttgtgggcgaagatgcgggtctcgctgcggctgtgcctgatcccctcgatcatcgacgcgtgattgagctcatccgacaggattgtgcagccgggcatccgcgacgccagcgtgctcagcgacgccatgttggagacgtagcccgacgtaaatagaagtgctgcctccttgccgtgaaggtcggctaactccttctccagcagcacgtgatagtgattggttccggcgatgttgcgtgtgccgccggcccctgcgccgcaactgtcgagcgcctcatgcatcgccttcaggaccgcggggtgctggcccatgcccaggtaatcgttggagcaccagacagtgacttcaccggcgccgcccggatgatgatgcttggcgcggggaaatgcgcctgccctgcgttcaagatcggcgaacacgcggtagcggccctcgcgatgaagaccttcgagctgccgacgaaaataggcttcgtagttcatgacgttctccccttgattgttgcctccggctcaggacagatctggtgagccgccgtgaggccttctcttgcctgctgctcgcgataactctgacgaaactggtcttcgagccgcagtcgcgcgcaggccgcctgcgagactttgggaggcgtcgcatcggggcgcatatccgcgagcacgacgagattgagcggcgcagcaatggccttggcgtcttgttcctgttccatcgtgatgtcctccggcgggaaacccgagcgcatgccccagccccacagcgtgatcgccggcagcggaagcaacatgaaccaatgctcgacaacgccgagcgcaaacagcgtcgataccagcgtcaggctggcgatctcgaaaggcgtgaccgacacttcgacaatgcgctggatcatgatgacgagagccgcggtcgcaagcgtgaccgagaccggaaagaagccgctgatcggcctgcgcgcgaagaacgtcttcaggaatcgcaccgcgtccggcatcaactcgtcgttggtgacgggcacgccaaggaagaggttgatcttggcgctttgccgcagcacccaaagcgccgcaaaggtccagagaccgacctggttagggctggcccacgtcagcgcgacaatggcggcgccacaggccagcagagcgaattcgtgatagaggatggcctgcaaggcgaaaccgaggcgcgacccgccggtcgcgccgaccggacattgctgcgggcgcggccccgtcagccaccccgcgagaaaagtgatctcctgggcagcccacagcaggatcgtgcaagtgaaggccgtataggcgccgccgacgctcgcatcgccagcggttagcgcgaggcctccgagcgaccccgcgagcagcccaactgcgaggaacgctcgcgacagttcgaaccgtcccgagcgtccgaccagcaacagcacggccccggtgctgaaccaccacacgaaagcagcgtagatgggggggaccgtgtatgcggcgatcaacacactctcctcaccaggccggttgcagacagatttcgcgcgggagcgcgttaggcttcaccggcagcaggaacagccgcgcaaacgtcagcccagcccggaccgcaaggcctgcgcgcttcactttcgacaacaagccgccgtcctcgcgcgcatccgcaatcgcttccgaaatcatgcgcaagcgctcgagacctgcaaaaaagcgcgggttctcgatatccagcgtgaccggaaacacctgcttggaaatctcggaagtgatgcggaagacccgcatgtcgtactctgtgggatccattccgagcgcgtcgtggaaagcgggacgcatgtgatcacgaacatacatggttgcgaatacggcgagcaggaagaatcggatccagagcttgttgagtccgcgcagcagcgacggatcggcgcgcatcaacagcgcaaacgcctcgccatggcggaactcgtcgttgcaccacaattcgaaccagcggaagatcggatggaattgccgctcgggatgtcgctccatctgccggtagatcgtaatgtagcgggcatagccgatcttctccgacaggtaggtcgcgtagaagatgaatttaggacggaagtacgtgtatttcttcactttggtgaggaagctcagatccaccccgatgccgtgatccttcaggatctcgttaatgaagccggcatggcgagcttcgtcccggctcatgaagctgaacaattcctggatatccctgttcttgatccgcttcttgatctccgcgtagagcacgcagcccgagaattcggcggtaagcgaactgacgaggaaatccttgaactccctgcgcagctcaggcggaagcgattgcaggtcgttcttgaattcgtcggtcttgacgaaatgcgccttgttgtgatcggcgcgcaattccttgatgacggcattccattcggagcgcaccaggctgacgtcgaggcgatccatagcctcataatcggtcgtgtagaagcgcgggctgaggatggtatcctcgcgagccttgtcgaggctttcgctgcttcctttgatcgcgggacgtgtttgcagactgccggccgtgccaccttccatgttgatcatgatgctctcccgtctgagaagctgacttcgtaaagctcagtcaattccagatagccctcgatccgcgcccatagccggtcgagcgggccggcccgcaccacggtcgcggttctccgcacgaccagccgctcgccgaaggcaacgccggtcggcgcgtcatgaaccatgacctcgtcgcccggctggatcgcgatgtcgccgtcaagcacgacatgggcgtgcaacgtttcggacgtctgctcgatctcgatcgtgcagggcacgtcgaacgtcttgcgcgacgtcgtccagagcatcgtcatgccccacctcccttcagcttcatcagccgcgcaaaggcctccgtattggccgatccgaaggcgtcgaggtcgatctgcttgccggtcgatgtgtccgtcagcgtgatctggccgttgacaaaccgggtgaggcgaaacggcggttgccgaccgatgtcgccgcgcttgcgctcccgcgcgagcccgcgcagcacgacgcggatgaagccattacttcccggcgccagcgtgtccacgagttgacgatcgtgtgcgtcgtacaccagcactgcaccgtcctgggcgtcctcgaactggagatctcggctctcggcggcgggcggcaacgtcatgtggacgccgcccgtccccgtcagtcgcgccgttgtcaccgtcgcgagcgaaaacaggacgagagccgcggccgcgatgatgccgcctctggggaccacgggctcctggatagcctggctcatgagtgtcctccgttcaggcggccgctgtcgacggcgaattggccgtgaggtccgagaccaaattgcgattgacggatgtcgagagcgcgaccgccgttggagcgggctgacctcccaacgcctccgaaagccgggccgcgacgaccgcggggtccggcaatgcgcacatcatgggttccggcgcacgcagccgccaaggccggatgtgcggccacagcagcaagtaggacacgcgtttgccgtccgacacccctagcggaatatcgcccgagccgtcgtgatggatcttcagagcggcgttggtgatcttgttcagcggaatattcatggtgatcggcagcgcgacgccgaactggaacaggaccctcttgctggtgatggtgtagcaggcggcgcggcggaataaccaggcgagacccgccagcacggcgatggcactgatcgccggcgcgatcagccatagagccgaaataacgacgtcgcccgcttggactccgtgcagccagttcgaccacagccgccacgccagcagcacgccgaaatagatcgcgacctcacggatgtgaaacgaccgcaacgctagtcctttgagactcggcttcccttgccagatcacgcgctcgccgacaggcaacggcgcgggcagctccttgaactgcgtactctcgaattggtggtgatcctgtttcacagcagcggctcctgacgcgcgggcgtggcatagagcgtgcccgcgccgtaatatccgacgatgcgatcttcctcgagcttggtcacctgatcggggctcttcgtcgccggcacgtcgacgaactggctgccgaggatggcatcgacccagactcggctgcggcggccatcgatcttggcgaacggcatcggtagcagcacacgtttcgcgccacccgacgtcgtgacttccacttcgagatagcggatcagagcttcggcgcgatcgacccagacgtcggtgacggtgccgcccatttcgctgtccgcgccgttcacccgcatgccgcgcggatcggggtcgcgggattcgagataggtgccttcggcaagacgcagcggaacgatacaggggacgttctccatcgttagttcgggaccgtcctcgcgattagcgtaggacccgggcccgacgccatccagcatcggattgccggtcggctcggccggagcgcccggccacaccgcgatcggcgccaacgcgacgtcggggcgatcgttcttgtggttcggtagcgtcgcggtgtgcccgccgcgcaggaggtaggtcttgggatcgggcatgcgcggaaagccatacgcggccccgcccttgatgcccgtcgattcgagcggatagccttcgcgcttatcttcgcggcgaaggtagaagatcaggcaagcgaagaagatccagaagacgtagagcgtgacctgtgccaggtccatatacgagtcgggctgcatgggcgacctccctttcgttgactagcctggaaactcagccaggccaaactttgtggaaggctgcgagaaccccgtccgtgcgctgcggacgagcgggccaatcgcaaccagagtggcgaacaacaaagcaatttcgatgtggtagacgacgctgtatcccgtcgacggatcggtcagcgcgcgaccgagctcgccgctcgatgccagcgatgtcacggcatcgcggatgccgccaccgagcgcgatgccgctgccggcggcggtcgcctgcacggcgccccaggtgcccagcgccaatccgctctcaccctccgctgcaatcgccatcgcggcggtcaacgttcccgcggcgaacagcccgccaccgaatccgatcaaagcggtcccgatccgaaacagcagaaccgaacccaagggcgctgcaaaaatcactgccgcgaaagcaaacacgcctgctaccgcgccgaaaccagcgatgcgatagggatcggcattgcgccccagcgtccttgcggccaggccaaatccagccagcgtgccgagcgcaaaaaatgccgtgagcgccgtggtctggcccaccgtcagcttgaggatttcggcgccgtagggctctagcagaatatcctgcatcgaaaatgccgaagtaccgagcgccacggcgacaaggacgcggaccgaaccgccggagttacggaacctggcccaggattgctggaattcggggagctctcgggaagccgacgtcagccctggattgcgcgcttcctgcttccacagggcggcgacgttgagcagcagttgcatgacggcgacaccctggatcacctggatcaggcggatctcgttgaagttgcgcaacagctcgctaaagatcagcgcactgccggccatcccgaacagcagcatcacatagaggaaggccacgacgcgcggccgcgcatccgccggcgccagatcggtggcgagtgcgagacccgcagtctgggcggtatgcatgccggcgccgaccaacaggaaggcgagcgctgcgccgaactgtccgtaaacggcgggatactcgccggtgcccgacagcaccagcagcgcaaacggaaggatggcaaagccgccgaactggatcagtgtccccatccagatatagggcactctgcgccaacccagcacggagcgatgattgtcggatttgaagccgatcagaacgcggaacggcgcgaacaccagggggatcgacaccatcagcgaaaccagcagcgtggagacaccaagctcgacgatcatcacacggttgagcgtgccgttcagcagaacgatcgagatgccggtcgatacctggaacagcgacagacgcagcagccgtccgagcggaagctccgccgttgccgcgtcggcaaagggaaggaagcgggtcccgagccgcatccagccttttgccaatatcgacgatatccgggtcatcgtggaatcacttccagggcctgcgacttgtagaatcccctggctacgcgatgactgcggccgagctcccagcgctcaaacccctcatccgccatcagcaaccgtcgcaatttctgctcggcaaccggctcgatcgccggtgcacgatcaccgcgtggaaagagtcggccgacggcatgcatcacggtcagcgccggcgtcttcggcgcgaacgtcaccagcatggccgcggcggtccgctccgccagaccggccatgatccggcagatatccgccgggcgatagtggatcagcgaatccatcgcaaccacgaagtcaaacctgccgagtttgggatcgagcatgtcgccggagcggaattcgatggtcgagccgccgaggtcagacggcaggcgttcccgcgccaccgacaccaaagtcggcgacagatcgatcgcgaccacgcttgcgccgcgccgggcagcctcgatcgacaacgctccggtgccgcatccggcatcgagcaatcgcgcgccgttcatgttctgcggcagccacgacagcagcgtgttgcgcatctcgtcccggccagcacggacagtggctctgatacgaccgactggcacatccgacgtcagcttggcccatgcatcgaccgcagtccggtcgaaataggtctcaagttcgccgcgccgttcgagataggttgcaatggacatcagtcgaaccccagcagatcgaagatttcacggtccttgagtgattttcccggcgacggctcgatcgttccggcccagagctccgcggccagccgcatgtattcgtccgtaacggccttcagctccggcgtctcgttcatttcgaacagcgttgatttcttcaggcggcttttgcggatggcgtcgagatccgggaaatgcgcaacgcgtttcaatgcggcctgctcggcataacgatcgatctggtcggtattcctgctgcggttggcaatgacgccaccgagccggacgccgtaattcctggacttggcctcgattgcggcgacgatgcggttcattgcgaagatcgagtcgaaatcattggccgcgacgatcaacgcgcgatcggaatgttgaagcggtgcggcaaagccgccgcagacgacgtcgccgagcacatcgaagatcaccacgtcggtatcttcgagcaggtggtgctccttcagtagcttcacggtctggccgacgacatagccgccacagccggtgcctgccggcgggccgccggcctcgaggcacatcaccccgttataaccttcgaaaacgaaatcctcggggcggagctcctcggcgtggaagttcacagattccagtacgtcgatcacggtcgggaccagccgcttagtcagcgtgaaggtcgagtcgtgcttcggatcgcagccaatctgcagcacgcgcttgccgagcttggagaatgcgaccgacaggttcgacgaggtggtgctcttgccgatgccgcccttcccgtagatcgagaacacctttgcggtgccgatcttgagcttgggatcgagctggacctgcacgcttccctcaccgtcgccacggcaggacgggctcttgagcgacgatggcctagtctggatgttcatgcagcaactcccacgccctcgaggcggtcttcgagctcttcgcctgccctgcgcaggacatcgagcatctccggatcgggtgaccagtatttgcgctcgtgcgcctcgatcagccggttcgcgacctttgcggacgccacgggattgagagacgccaggcgttcgcgcatttcgatatcgagcacgaaggtctcagtgagctgccggtagacccagggcgctacctcgcccgtcgtcgccgaccagcccatcgtgttggtgacatgctcttcgatctggcgaacgccctcatagccgtgcttgagcatgccctcgtaccatttcgggttgagcatgcgggtgcgggtttccagcgcgacctgctccgacagcgtccggaccgtacccgcgccgcgggtctgatcgccaatatagaccggcgcggactggccacccttggctattcgaaccgcacggctaatgccgcccagcgtgtcgaaatagtggtccacggtcgtcacgccgagctcgaccgagtcgaggttctggtaagcgagatcgatggtagcgagcgcgttcttcaatagcgccgtttgctgcaccggctgccccttgaggccataagcaaagctcttgcggcgcgtataggtctcggcgagttcgtcctcgtcatcccagcggccgttctcaaccaggtggttgacgttggaaccgtaggcaccgtcggcattgccgaacacgcgcaaagaggccgtttccaggtcgcaattattcgtagcctggaacgccagggcatgcttacggacaaagttctgttcgagcggctcttcagcggacgcggccaggaagcagctttcggccagtagcttgatctgcagcggcaacagatcacggaatatcccggacatggtgatgattacgtcgatccgcggccggttgagctgatcgagcgggatcaattccgcgccggtcaggcggccatagccgtcaaagcgcggttttgctccaagcaaggccagcgcctgtccgatcggcgcgccttcgttcttgaggttgtcggtgccccaaagcacaatcgcaaccgattccggaatcccgtgtccgtcgccgacatgcttgtcgatcagccgctgcgcctggtgtgctccgtcctgcaccgcaaaagcgctcgggatgcggaacggatcgaagccatggagattacgcccagtcggcaggatcgccggcgtgcgcagaagatcgccgccgggtgctggacgcacgaatttgccgtccagcgcatgcaggatcgcgggcagttcatgatcctgctggaggatgcgatcgatgccggccaattccgtgtaaagcgacagcgcagcgtcgtttttcgcggccagtccttcgggcgtctcgcccttcaccagcgcttcgaggatcgatctgtccagacgcgcgccgtgcgaagcatcggcaaccgcctgcagcatctcgacccgctgttcgaccgacggcgtctcaccaacgacgtgcagtccatgcggaatcagggtgtattcgagctcaagcacggcttccgacaatttgccgacggccgtggccggatccatccaggcaggctcggacttggtcagttccagtgcactggcctgggcctggatcaatgtcccgagatcgccgcgctccgcatcctcacccggagcgagtccacgccaacgtgcgatcgaggccttcagctcgaccagccccttgtagagcccggcatgtgcgacgggcggcgtaagatagctgattagcgtcgcggccgaacggcgtttggcgatcgtgccttccgacgggttgttcgaagcatacagataaacattcggcaggtcgccgatcatgcggtccggccagcacgcgcctgagaggccggcctgcttgcccggcatgaattcgagcgcgccgtgagttccgaaatgcagaaccgagccggcgccgaaatcctggcgcagccagcgataaaaagccgagaaagcatgcgttggggcaaatcccttctcgaacaacagtcgcatcgggtcgccctcgtaaccgaacgcgggctggatcccgacgaagacgttgccgaagcgctcacccagcacgaagatcgagctgccgtcgctctgctgcttgcctggcgccggcccccattgtgcctcgatctggcgtagccatttttcgttccgaacgtgatcaccagccggaattctggcgtggacgttggcatcagcgccgaagcgggcggcattgccaacgacgatacgctcgcgcaaggcgtcagcactttcgggcacctcgacatgatagccttcgcgctccattgtactaagcgtgcgatgaagcgattcgaagaccgatagaaacgctgcggtgccggtgttgccagcgttgggcgggaaattgaacaagacgatcgcgaccttgcgatcccgccgtttggaacggcgcgtcgcgacgaggcgggccgtacgggcagccagcatctcggctcgttcgctgcacacatgcatttcgccaccggtctcggccggtgcgaaaatgcaggcgcgctcgcagccggtacaggtagcgcctgccccgtcagagcgaccgccatagatcatcggtcctgcggcgccgtcgagctcgggaatcgccaccatgatggtgctttccaccggcatcagaccgcgatccgaagccccccattgttccagcgtctggaactcgacgggatgcgccgacagataggggacgtcgagttgcgcgaggatatcctcggccgcgcgggagtcgttgtaagcgggaccaccgaccagcgagaagccggttagcgagaccaccgtatcgacgacgctgcgtccgtccttcatgaagaaacgttcgatcgccgggcgctggtcgaggccgctggcgaaggcggggatcacgcgcaagccccttgcctcaaacgcagcgatcacaccatcatagtgaccggaattcccggcgagcagataggagcgcaacagcaagagaccgacggtgccgcgcgcgtcaaccgggataggaagtctctccgcagtatcgccaatgcgacccttgagccgcgggtggtagacaccgatgtcggcatagtcgaccggcgcgtcagccttgacaatgccgcgcaggccgcggcgcggaccgtcggcgtaccggtcgaccaacaggcggatcatgttagcgatgttctgctccgagccggccagccaatattgcaaggtcaggaaataggcgcgcatgtcctgcgcggtgcctgggatgaagcgcagcaatttgggtagctgccgcagcattttcatctcgcccttgccaccagggctgcctttgcgattgccgcgcagcttcttcagccatgcgatggcgccaagcgcctcgccgctcatgtcgaacttgccgacccgcgtcagcctgacgatctcggctgccgacatgcagcagatcatcgcatcgcaatgactgcgccgggcaatgagtgccggcatcacgaggcgaacatggtcgtcgagaaacagcatcgtggcgatcacgatgtcgccgcggtcgatgtcggccctgcaacgatcgagcgctgcgtcatcggtaccccattcgtccgcagaatgaaccgcgagcgacaatcccgggaagctgctcctcaacagcacttgcgcccgcgcagccgcgccggaaagatgactgtccatggtcacgacgacaaccttcagaggcgtcgcgtcagcgggcgtaatgcgctttggcatcgtagagcgtctcaatggttatggtggcaacgccggtttcgttggcgaaacgttcggtgttgcggcgtgccttgccgcgaacgaagaacggaatttttcgcagctctttctcggcatcggcggcccaggtcacgctagtcagcaccgcggctgaggctagttcggtaatctgaaccggctttgcggcatcggacacctgatggcccgcgcccagatgggaaggcactgctccgtccgtgaactcgaaatcatccttgaacatcgccagcagatgctcctcgaggcccatcatcagcggatgcacccaggtatcgaagatgacgttggcgccctcaaatcccatctgcggcgcatagcgtgccggaaagtcctgcacatgcaccggcgccgagattacggcgcagggaaccccaaggcgtttggcgatatgtcgctccatctgggttcccagcactaactcgggctgcagttccgcaactttcgcctcgacttccagatagtcatcggtgatcaacggctcgacatcgtagcgcttcgccgcctcgcggatttcgcgcccgaactcgcggctgtaggtgccaaggccgacaaccttgaagccgagttcatcggatgcgatgcgcgcggcggcggcggcgtgggtggcgtcaccgaagatgaagacgcgcttgccggtgagataggtcgaatcgaccgaacgcgagtaccacggtagccgggtggaggccgaggcgagcgtcgccgacgcatcgacaccagcgagcttcgcgacctcttcgacaaattcgcgggtggccgacacgccgatcgggacggccttggtgaagggctgaccaaaggtccggtgcagccaggacgccgcctggccggcgatttcgggatagagcacgacgttgaagtcggcttcgcccaatctcacgatatcggcaggtctagcccccatcggcgccgtgacgttcacgtcgatgccgagctttgccagcagtgacgtaatttccgcgacatcgtcgcgatggcggaagccgagagccgttgggccaagcagattgcagcgagcacggactcctgcggcacgcagcgaacgcggcattccgggtgccggcgctgacgggcccgcgagcgcgcgcaccagttgatagaaggtttcggccgcgccccaattttccttccgctgataggccggcagatcgacggcgacaacggggatcgggaggttgagcgcacgtgccagcccgccggggtcgtcctggatcaacgagccggtacaggacgcgccaaccagcaacgcctgcggttggaaacgatcgtaggcattctgcgcagccgtcttgaacagttcggctgtgtcaccgccaagatcgcgcgcggaaaacgtcgtgtaggtcacaggcgggcgtaggtcgcggcgctcgatcatcgtaaacagcagatccgcgtaggtatcgccctgcggcgcgtgcagcacataatgcaggcgctccattcccgtggcgacgcgcatcgcgccgacgtggggaggtccttcatatgtccacacggtgagctgcatgatcaggccaccagcttcgcgcggcgcaccagaggacgcgaaaagagctcagcgagatctgccgcctgctcataaccctggatcggcgtgaacacgagttcgatcgaccatttggtggtcatgccttcggcctcaaggggattggcaagtccaagcccgcagaccactagatcgggtcgcgcccttcggcaacgatcgagctgcaaatcgacgtcctgcccctccgacagtgcgacatcgtccggcagcagcctgagctcttcggcgagatgctcgcgatgcagatagggtgtcccgacctcgaccagttgcatcgacaattcgcgcgacagaaaccgcgccatgggaatctcgagctgggaatccgggaacaggaaaatgctacgacccgacaattggtcacggtagcgaagcagcgaccgctccgccctgatccgatggggttgcgtcaccgcctcgaacaacgcgggcgcgacaccgaacgcatcggccgccgcacgcagccaagccgtcgtgccctcgacacccagcgggaaaggcgcggccaaccgcacggcgccgcgaccttccagcgcgcgcgccgtgtcagcgagaaacggttgagctaggagaaatctggtgttcggtccgacctcaggcagtgccgcagagtttcgcggcggcagaaactgcacggtgccgatgccgagcgagtcaaacaggcggatgaactggtcctcgaccacgtcggccagcgaccccacgatcagtaattggtcctcgctcgtccgggtcgggggggccgcagggacgagcgaggcgagacaggcatcctcgccttgcgtgaatgttgtctcgattccgctgcctgagtaattgagaacgcggaccccaggcgaaaatttctgcgacagccgcaaagcagcgcgcgacaaatcgagcttgatcacttcggagggacaagagccgaccaaaaacagcaaccttatgtcaggccgccgggcaatcagctgagcgacgatccgatccaattcgtcgttggcatcggtgagcccggcgagatccttctcctccatgatcgcggtcgcaaatcgcggctcggcgaagatcatcacgccggccgctgactgaatcagatgcgcgcaggtccgcgagccgaccacgagaaagaaggcatcctggatcttccggtgcaaccaaacgattccagtcagcccacagaatacttcgcgttggccgctctcacggcggaccggactgggcccgacatcggctgcgaccggacatccctgcacatgcatattcatgcgccgctcccgggggtcgagggagccgcagtcagcgccgatcgttcgtcgcgccgcgccgcgcgcagcttgaggacgaactgcgtcgcgttaacgaagtaggaggcgtacgccgccagagcgagcagcatctgctggcgcggattgccgagctccgcgaacagcgcgatcagataggcggtgtgcagcgccagcacgaggaagctgaaaacatcctcccagaagaaagccgacgcgaacagatagcagccgaatacctcgcgttcccaaatcgaaccggtgatcatgatcgcgtagagtacaagcgtcttgacgacgatcgacgccgctgcgacggcaaagccctcgcctgtaaagagacaacgaagcaccagcgcgagactaatgaggaaaacggcgaactggaccggcgcgaggatgccctgcaccagcgtccactttgttgcatcgcggcgaatgcgttgttcgggcgtgtacagcggcctaagtgattgggctgtcgaacgggctcgcgatgcgccgtctcgtatttgcgaaattccgttcgcaggcgcagcgacgtattcacctgtcgaactgtaaagactgtttgacagttctgcgtcgcggtgatgcgatatcgactggagaaatcgagcagctgccgacgaagggtcgttttgtttgggaaaccggccgcttttggctgctcgaaacaccgcgccactccataagtgcgggcttgatcgaaacaaggctaaacctcgcttcgagaactgtcaactaaactgtacgtaaattaaacttgacggttttgaagcgtggcgacttaatgcttgggggagcgaaatatgaccgatgtgaacgagcaatccttctcagccggtagcgccaccgacaccacgtcggcgcctcgtcctaaatcgctgcgacagagaattccggcgccgatctggcgctttcggccgaccctgcaaccggtcgcgatggtccgcacaatcaagacgcagatcattcccaagatcgtgctggcgttacgcagcacaccgatcgcaaaggctgcggagatcgcagagccgaccgcaccgaccgaggtggagatgttcgcggcgcttgcgcttggtgccgatgacggcgcagcatttgcctatgtcgtggatctccaggcgaaaggcgcgtcggtcgaatcaatctttctcgatcttctggcgcccgcagcacgacagctcggcgcgcagtgggaatcggacacgacggattttgccagcgttacgctcggtgtcggtcgattgcagctcatcatgcaccggctcggccacagcttcgtgcacgaagccagcgacgaccacggcggcgaatcggcactgctaacgatcattccgggcgaccaacacagtttcggactatccatggtggccgagttcttccgccgcgcgggctggaatctctgcaccggcccgttttcgtcgcaccaagagctgacatcactggtgcataatcactggttcgacatcgtcggcttctccgttagcagcgataggcggctcgatgagttgaagagggacatccacgacatccggcgcgactcgcgcaaccggcaggtcggcatcgttttgggcggcccgctagtaatcgctcagcctgaccttgtggcgtcgatgggagccgatatgatgtcggcagacgcgaccactgcgccgcaggaggcgcatgggctgatcgaacagctgaagggccggacgtgaccggcctcaacggacggggacggcgtagattgacgcgacgaagcttaccttacaaagcgattgcggaggcgaccggaatgaccgctgcaacggcggatggccccttgccgctcagcgtcgtgacggcgctctatctccgtaccaaggcgctgcatgccgaagccgaacgcaccggcattattcgaagtctgctgcggggtgaagcgagccgggcaggctacatcctgttcttgcgcaatctgctccccgcctaccgggccatggagcgtgggctcgagcgccatcgcagttcacccggcatcgcattgctgtcccgctaccggctcgagcgcacgctcgcgatcgaaaccgaccttgccgccctgtgcggcgagcgatggatcgaggacattccactgcttgccgccggcgatatctacgctaagcgggtatcgcatgcggccgatggcgacggcctgagactgatcgcacatgcctatacccgctatctcggggacctcagcggcggccagatcctgcaaagactgcttgcgcgctcgcttgggcttcgcccattggagctgaccttctacgattttccgcacttttcggatctggacgtgctgaaggccgactaccgcagggcgcttgaggaagccggtgcacttgcgtccgatccgcaagccctggtggaggaaggtgcaatcgcattctccatgaatatcgacatctcatgcgccgtcgaggctgcagtgccgcatgtatcggcctccatagcggccatgcaataagtcggccgcgccagtagtttcaggcgttaggcttgccgccgcctgaggtccgtgacgcatgccagatcagatgttcaagcacttcggcagtgcgcagcgtcgaattgcggacgctctcgagcatctcggcgatccggccggtttccacaccataggtgatttccagcgcggcgagctgggcgttctcgatcaccgacgacagtaggttctggtagacgagatcggtcttcgaatcgagacggacgctgctgatacgattgctttgaacgatcccttcctggaaacggctgcgcgcaatctcggcggcctttcgatcggtgatatcggagaagatcagcacgaagccgagcacccggtcccgcgacggatgcactggatcggccctgatcagcaacggcttttcccggttactttcgctgcgcaacagcaactcgccgcgccatgggcgatggtgacggatgagctccgcaacatcgcgaaggaaacggtccggttgttgaaatgccccggccaattcatccagccggccgaacgcggaatgatccttcggcagcaacgtcttgaacgcctcgttcactagcaggatcttgccgtcgatatcggcgatgatcaccggctgctcggacacgcgcacctgacgactgaactgttcgagctggtcttgggcgatgagggtgcgcaccgcgcggaattgcagcacaatgtccgccaccgactgaccaatcaggcgcgcggcggcgagatcggctggcgtccaagggtcggacgttccttctacctgctgatgccactgcgcaaacgaccggcgcggcgacaaatccgtggggctgttgccgatcacgaacggcttcaacggatcgccgccccaggtcaccgtgcgaatgcgctccggccggaaccagatcaggtattcgcccggattgctggagatcggcgtcactgcgaccccgctcgcaacctttgtaatccccgcgaattgcggaagatccaggccgagcgatgccgtcgccaccacggttcgatcacgatgcgtgtccagccacgcgccgatctccctaatctcttgtgtccccggaacctccccggtcgaaataatctggccctcatagatcagagcgcctccactcgccccgagcggctgcaggatcgattgcgagctgtcgaagatcgcgcctcgccagtcaccttcgcgcgacatcgcctcgatcattcgctgctcgagccgttgcacgaagagctcggactgactctgcgcaaagctctcgagcgccgcgatgcgtgtcgcgatcgcctcggcaagcagttcgcaaaccgcccgcaattcgaaatgtatgaagcgcggctcgtaatggtgacaggcgacgaggccccatagctttccgccgaccacgagcgagatcaccagggtggcgccaacacccatgttcttcaggtactgaaggtgaatcggcgacatgctgcgcaggaagcagagcgacatgtccagatcccgcccggtgatcggcgaaaaccggggctgcagcgggacgggctgatagttcacatccaccagcacgcggactcttgtgcgctcatagaggcgcctcgccatctgcggaatatcggtcgcagggtagcggttgcccagatacgcctcgagctccggcttgcggcgttccgaaaatacttcgccgtggccctcgtcatcgaaacgatagaccatgacccggtcatagccagtacgatcctggaacaaggtcgcagcctcctcgcacagcgcgcgaatcgaggaggccgtgcggatcttctcgagcgccttggcgatatacctggtcaaatcgaccgaaggtccggcccgctccagctcaatgaccaaccctccttcgggcggtcgatgcaaaagcccgtcataatcggcgccggggcttccgatcctgcagcgcactgcgatcggcattccctgcgcggttgggtcgaggtgcggaagaattcggaccagcaggtcgccgtcgagatcggcgagcgccattccgtcgacttgcttcagattgagaaattcagcggcattggcgctggcttgaatgacacggtgatcgggctcgctgacgaccaatagggcgccatggggctgtatcgagcccgcgagatggatctcttcccgttcgcagttggaaaggtcggcttttccgaatgctggtgtagcgagcgaatgcagcgccaactcagtcctctggggtttcctcggcgtccggctccttgtcgtccaggccgtagcgattgagctttgcataaaggctctggcggctcaatccaagaagttctgctgtcgcggtgcggttgccacctgcgatctcgagcgcctgcttcacatagtgctgttcgacgacgccaaccgtattcttgacgagctggcgcagcgacgatttcccgatctgctcgctcatcgaacccagtgcggtgcgcagaaaatcactctcactgcctgacggaaggcgacgggccacattgcgaagcagcacgccgatgtgaccgagcccgccctccccggtcccagccgagatttcgacctcggtctcggtaccgagctcgccgcgaatcgacgtcgtgaacagccgcacggtcttgtgccgctggatgttcgaaaggagtgcatttaggtcggcgcccggttgccagagccaccggccaagcgattccccgattgcggaagccttcgagccgagctgcacaagatcaaggaaggcctgattggcatggcgaatgatgcccgcgtcgtcgagcgccacgaacccgtccggcaaatgctcgaccaactcctctacggtcgaaggctcactcttgtctttcggagccgatagttcggtcgcggcggtaaattgcagcagaaacacgtggccgggctccgccgtcatcagcgacccccgcagcatccagggcttcgcttcagggccaagatgcacaaggatgctcaacgccttgccgcgttcgcggatgcgcgccagcacttcgcgaacggcgtcgcggtcttcagcggcgatgtcatgcagcagttcgcgtcccgcgatgtcctcgttgcggcgacgcggcgaattcagcgcttcaatcgcagtacggttggcttccaggatccgcagattggcggccgatacgatcaggacggcctcgtttgatgcgtcgaagaccagacggtagcgcgtctcgatttcgcgcagcttccaatagtcgcgctccatcgtctgctgggccgcgatcaggcgcgactgaagctcggcgaccgcttgcaggtttttgccgatcgccagcatcccggctcggccacccagcagcaccgtggtgtattccatcggaatttcgagaccgctcggaaagcgctggttgatttggcggaacgccgaaatgccggtgacgcgcgcgtcatcgaccatgcgcttgaccttctcgccccccatttcaccggcaacttcgacccaagggcggccgagccatccgtcgacgctctcgccgctcatcgacggagatagcgtcgcttcgcggatcacaccctccatgtccagcaggagcgtgatgtcgggctgtacggtcggtaatacggccattctgctatctgccgatctttctctgcggaagcgggaagctgtcgaaacgacggcagtgaagaccagtgcacacggcatgccaatattgcctgacacccgccagctgaaactggcacacatacccggtagcaatgcgcagaatctcgcataaagtcaagaaacacctttgttttgaggcttttagttgtcacatttgtctgacaccggtagtgggcacccctggcgacaagatcgccgataaacatccgaataacgccaaccaacacgaattcgtttgatgcagtccaaaagaatgtcaggaaccgacaacatcagttgatatttaaaactgtcaatatatcctaacactcaaaccgagaccaaatcgaagtcagggagagcaacgtgccggtgaaatctgcagtttttgcttgtgccgcagcagccattgtcttcccgagcagcgcggccctggctcaggacgctgccaagggtgagcagatattcaagcaatgcatgacctgtcaccgcatcggtcctgacgccaagaacctggttggaccagtcttgaccggcgtcatcggccggcaatcgggaacggcgccaggtttcgcctattcggcgttgaacaaagccgcaggcgagaacggattggtttggtccgacgacctgatcttccagtatctgcccgatccgaacgcattcctgaagaaattcctgaccgacaagggtaaggcggatctggcaaccggctcgaccaagatggcgttcaagctcaccgacgagcagcagcgcaaggacgtgatcgcctacatcaataagttctccgaaaagaaatagccgaatggcgcagggccggcgcgggctagttgcgccaccgctgggtgacgtcggtcagatgcgccaggccggcggccgtcaggaaaagacttgccaacatccagccgctgccagcgagggttgcgcgcagcgcgaaaagaaggaatacgccggcgcacagattgggtagcaggtcgcgcggcgcgatgcctcgtcgagcacgcgaccaatagaccaacaaggccgcggcctcgagaatgaccacgacaagaatgaagtcgacgaggcgcccactcgcaaacaactcagccatgccggaagatcacatggacacccgatgcttgcaacctatcgtcaggcaaagggcccgttcaaacgaacgaccgtgaggttgagaaatgcggcgaatgatacccacaacagataaggcaccaggtaaaggctcgcgggccttgcgaagcgccagaagacgatggtcggcaacaggatcgaaagccacaggaacaccacctcgatcagcgcccaatccggacgtttcaacgcgaaaaacaatgtgctccacaacacgttgagaaatccattcagggcgaacagcgcgatcacccattcccgttgcgcgcgactggcggcattgcgccaggcatggaccgccgacgccgtcgccagcgcaaagatcagggtccatgcaggaccgaacagccaatccggcggctgccaagacggcttgatgaggctctgataccagattccggtatctgtcagcgtgccgccaagcacggcaatgaagatcgcaacggaagccgcgaccagcacgggcttccaggaaccgccgcgcgtggccattatgccgatgccagtcctgccatgtgggcaaggttcttgaagaagatgcgtacatgggcgacaggcttggcacgaaccagttccttgttcatgtaagcatcccaggtcagcttctggacgtcgcggtcgcggcagatgctgacgaagcgttcgcgacggcgatcgttggaataccagtaccgctgcatcacgccgagaatccaaaatacaacaccgtgcagccgcatgaagcgccttcgggcgttgcgcagtgccttggcgtccccggtctccagaaactcgtcgacggcttccgccgacaggcgtccgccgatcatcgcgtagtagatgccctcgcccgacgcgggagcaacgacacctgctgcatcgccagcaagcagcacgctgtgcccatcgtcccaccgcggcagcgggcgcagcgggatcggggcgccttcgcgacgaatcgtctcggacgttccaagccccgcggcatcccgcaggccgccaacggactcccgcaatgaaaatcccttgcgggcggaacctgtgccgacgctgacggtgtcaccatgcgggaaaacccagccatagaagtcaggagacacactgccgcggtaatagacgtcacagcgcgtaccgtcgaagctggaagccaccggcggtgcgcgcacgatctcatgataggcaaatacgtaaggcagccgatccgaacctggaaaacactggcgcgccacggccgacaaggcgccatcggcgccgatcagcgcacgtgtccgaacggtcttcgccaccatggtcccgtcggcggcgcgttcttcgtaatggacaatggtcgtgtcggtctcgtcccgttcgaaacgcttgaacgtggccgtccgccgcttcgcgccagcctccgcggcgcgggtccgcaaccattcatcgaatacatcgcggtcgaccataccgacaaacccgccatcgatgggcatatcgacttgctggtcagatggcgacaccattcgggcggagttgacgtgcgcgaccagcaggtgatcagggatatcgaagtcgcggatcagtcgcggagggatcgcgccgccgcacggcttgatccgcccggcacggtcgagcaacaacacgctccgcccgagctttgcaagatcatgcgccgccgtcgcgccggacggtcctccgccgatcacgacggcatcaaaaatatccgaactggtcatgaccgcgctccttctgttacagtggcgatcggcaaattgaatacttgctgctgtgtcgcgtcttttgtcggcgcgcgatgaacccaaacggccatcacggcggcaatgacaaacaatcccgcctcggatgcgaacaccgcgaaataagacaacgccgccgacgtcaggacatagcgggcgatgtcgctggccagcgttcccaggaatccgccgattccgaatgcgaaagcctgggacgctccccacagacccatgcgcacgccttcccgcttctcgtcgcccgcgctgatcagcaccatcatcgagccgatcgccgccaccgcgtaggccccgttggtgacgccgagcatgaacacggtctcacgcaacggccacgacggcccgacgatcgccgccgccgccaaacataatagcgcgatcgccgaggcgagacatccaccgacggtccatagctggaggtttacccgagaccggggatagactgcgccaatcagcggcaccaaagccatgccgatcagcgttcccgcatgctggacgcccgaaagcttcgtcgtttcgccgggcgtgaaggcgaagaccgcgccggcaaacggctcgaggatcagatcctgcgcgctataggcgagcatcgagacgaaaacaaagatcgcgaaccgccgcgattttggctcgtgccatacttccatgaaggcatcgcgaaacgacggctggcgcgtcgacgatctcgaaaccagttgggcgcgagcgacggaacctccttcgacaccccatacgccgattatcgtgagcaccatcgccgccacagataccgatcccgaaacaatgatcagtcgcataggtgagaaaggatcgagccaatggcccgcaacaaccgtcgtcacgataaagcctgcaatcatcatcacccagacgatggtcgccgctgccgcgcggcggttgtcgtcggtgcgcttcgcgagcaggaccagcagcgacgtaccggcagcgccgacgcctgcaccgatcaggcagaaggcgaccaccgcgagcgcaataccaaataggggctgcgtcgtcatccaggccgtcgcgatcgaagccatcaagccgccggttgcgagcaccgccatgccgccgacgatccacggtgtccgacgggccccgagatccgaaccatggccccaggccggccggaagacctgaagaacataatgaatagcgacgagagcgcccggcagaatggctggcatcgccagttcgatcaccatgactcggttcagcgtcgatgtcgtcaacacgacgatcgcaccgaggccggtctgaatcaggccaagtctgacgatgccgaaccatgagagcattgaaccattcatggtcaactcgcctgcatcgcagccagcgcaaaggcgctgacgagcataccgacgacatagcaactgatcccggtcccgttgtaccagggcgcgcgctcgcgcggccccttcaggaagtggaccatcagcaacaactgcaccagcaccagcgcaccaactgccgccgcatgaattggctgctgccacgccagcaacatcgccacgaccgcgacttgcggcaccaccatcaccagacaggcgaagcgcgcggcattgtcgacgccgagcagcacgggcagcgaatcgatccccatccgctcgtcgccttcgaccgacttgaagtcattgagagtcataattccgtgggcgccgatgctgtagagcaacgcgatcaggacgatgcgccagtcgggcgcggatgcgctcatcaccgccgccccggtaaaccagggcagcccctcgtaacaaagcccgcacgccgcgttgccccaccagccgttctgcttgaggcggatcggcggtgcgctgtaggcccaagccagtacgagaccaacgaccgcggcgacaaagccccagttgcccagcagcggcgcaatcagcaacgacaggaccgtccatacgatcgcgatgtaaaggccccatcgaccagggatgcgcccggatggaatcggccggtcgggctcgttgatggcatcgacatgccggtcataccagtcgtttaccgcttggctggtgccgcagaccatcggtcctgccagcagtacacccacgatgatcgtcggccaccgctggcccggcgaaacgcccgaggacacgatcccgcaccccagcgcccacatcggcggaaaccaagtgataggcttcaacagttcgaggacaaccgacggcgcaggacgactgacaacgacactagtcatcttcgccctccccttcacccacttgctcggcaagcccaaagcgccggagcttcacgtacaggctctggcggctgaggccgagcatttccgcggccgatgcccggttatcgcgggtcaactcgagcgcggcctcgatcgatagcttttcgatgacgtcagtcgcttcgcgcacgagatcgcgcagcggaacccgccctatccgttcggtgagttgggcgacggagcgcgggagctcgcgggcggaggacggcgatgccgaaagacgtttttcgacattgcggattacgaagccgaaaccctgcttgcgatcgtcatggatcagagatgccgccgagacctcgacatccgtcgtcgcaccgtgttcgccgcgcagcgaggtcgagaacagcttgatcgagccggtctggcgaagattggcgaacgcgaccgcaaagtcgacaccggcacgaccgagccagcggtccagcgattcgccgcgcgcctgctcggcgctgccgagctgcgccatctctgtaaaggccgggttgaccatggcgatgcggccatcatgcccggtgatgaccaacgcatcgggcgcggcgtcgaaatactccagcaagctcgatgtcgccttcagcgccccggcttgcggcggcgcctcttgcgacaacaggcggaccagaaacaaggtcgcattctcctgccggaactgggatacggcgacaaagcactcctggtccaccttcgcaagccgggcacggatgttgccgtcgcgaccggtcgctcgaacattggatagcagtgtttgaaccggttcggcatccgccgaatcgaaatgtgagctaaggttagatttcagaacccgcggcgcgctctcctcaagcagcgccagcgcagccgtattgatctcaaggatggcattgttggaggcgtcaacgatcatgaccgcctccgacgagacctggaacagtaagcgatagcgcgtttcggcgtggcgcagtcggatgtagtcgcgctccatagattgctgggcgttgacgagccgttgttgaatggctgcaagcggccgtaggtcgcgaccaaccacgacgaaacgatcgtcgcgtccgatgttgacggccgaatagagcaccggaatatccacgccgccgggcgacggatgattgacctgacgccacatcgaaaactttttgtttactgcgtcctggagtaattccttggcttttgcggcggtttcggacgtcacgatttcggcgagcctcgaacctaaccagcggccgtgggcgtcgagttcgagcgagagatcttccttgttgaaggcgacatctcgaatgaccccctcgccgtctatgatcacagcgacgtcgctggcggccgcgatcaggttcgcggccggcaatgcgccgagattccccagcgactccttcggagatttgaacgcctgaaccagggcaaatatcctccaacaacccgtgatctctcacctagcgttcctcgaaccagtttctttgttggcggccgcttgtcgtacgaagctgaatcggaccgtacgccggcgcttcatctcggacaaccgcgacgggaagacgatgaaacatggcgcgcgccgtggcgtcctgttgcaatccggcgcgcgtctagaaacccatatgcattatcgcgggacggccagcccgtgcttgacgccccagtcgaaccaattgtcgacaaccgtgccggagagaagaataccgatgccaccgcaaagcggacagagcacagcgaaccaccaggcccagcgatggatcgattccgctgtcgcgttaaagcccatggtccagcgccagaacaaagctgcccgctcaagcgccgtgccgcggtcgacgatctgctcgatctcgcgctcaccgccgtagcggctaaccgccaggatcgtcgcaccgtgcatcgcgaacagcagggccgaaccatacaaaaacgcgatcgagagcatgtggaacggattgtagaagaggttgccgtgcgtaatcgagaagttattggtccagtcgagatgcgggaatatcccgaacgggacggcctcgctgaaatgtcccatcagcaacggacggatgaagccgagcacgagatagagccagatcgcagaagcgaaagcccaggcgacatgagtgcccatgccgagcgcacgtgcccgacggtaggtgcgcgcccaccacaacaggatcgaggtagtgaggaaaaagccggccatcagccaccatcctccttcctgcaatggcggaaaactgatgccgtattcgggctttggcggctccagcgacagccaggggagttgcctgacgaactcgatcgggctccagttcaccgatgccagcatattcaggccgatgatctcgattgcgacgatgccacaggcgatggacgccagcccgagaaatccgagatagaaaggtccgacctgggcgtcgcccacctttcctagccagtagttgaagcggccctcactggtgcgaacccatattcccggctggatcggaatcccggggtagatggtgctgcgcacctggacctgcgtgaagaagttttgatattgggccatggctcaggactctctctgatgaccggaattagtttgaggaccaaattggaagattgcgccaccagttccaccactcagaccaggcattgccttccgaccacaacggcccgctgattacgatgcagaccgcgctaaagaacaccgcagatagcgcgatgaaaagcccaacacgatgtatgccgagggtaccgaccgaatagccgatcagatcccggaacatcgtgttctcgtgctcgggcgtcttgaccggttcacccctgttcggattggtcgacgacagaataagaccgccgtgcagcgccagcgccagacacgtcgtgaagaagaacgtgatggcgatcatgtgtgcggggttgtagtggaaatttccgtattggtatccggtgttcgacacccaatcgagatgggtgatgatgccgtagggaaaaccatagctccatgaccccatcagcaccggccggatcacaacgagcgtaaaataggcgaagatggcgaaggcaaaagcgaacggtacatgatagccgatgcctagctttcggcagatctcgacctcgcgaagcgcccatgacacgaaggcgccgagcgcacagatcgtgacgatctgccagatcccgccttcctgcagaggcgcgaaggacaagccgtatttgacgtccggtggattgacgctgatctgccagagattccaggtgggaccaagcgcagtattccagaggatcatcgctatgccgacgaatgcgaaaaacaccgtcgtcaccccgaagaacccgacgtagaacgggccgacccagaaatcgaacaggtcgccgccgatgagcgttccgccgcgaacgcggtactttctttcaaagctgagcattgccatcgttcgtttctccggctgcgaaaaccagcgtcaccgtcatctccgggtggctaccggaagcggacaagaagggccgctcgatcctctcgtccgttccggtacgcatttcgtcatgccatcaggacggcatgcttggtggtgtgtacggcagagtgatctctgacgtcttcgccttgcgaggcccgtccaaccagttgaaccggtcggtcgagagcagaatgaagtggatcacgatcgccagtccaaacaggaacgtgaagagcgcgaccaaggcacggcgcggatcgaatagaagccaaattcgccacatgattgcctccctctatgtcaggtacgaaagggcgacgctggcaacgtgctggatgctgtccagcgccgttgtcttgtagccgcccgggccgggcaaccagggacgccacatccaggcgaggatatgggcaaccaccgcgacagccgtgaagagcaggaagctcgtcatgaatatcgaatggaattccttggcttcagcttcggatagccccgatagggaaccgtccttcatttgttatcctcctagtgatggccttgcggccgttcgccgcccaagcgtgggcgacagcgaatgccggatccatcgatacggcaattatccgcccggcaacgagctggacggaattccggttacagacccatgaacgatgacgttacgatcgtcccggctgcagtgcgggcctccgcgaagatcgactcgcggttcccggaatgggcgaagagtgctcgtttgcgccaaggtgtcagccggaagagcgcagcccgcaacaaaaaggccatgtaacaggcgccgaacaccacctgggattcgatgattttgtcctcgccgtgtactttcgatcgatcgccataagcataatcggacatcgacatcacctcccgcttatcgtcattgaattgcagacacggaatcaccggaaataggccggcctcgatcattctcatgcttgcgctccactcatcagcgccgcgcgggccctggtcacgaaatccgtggtgacgcgcgcctcgccagcctggcgcgcgctgctctcggcggcatcgcgcaggcgcttcgccgccgagatgcgcaccagcaccggatgggcgtccagcacctcgtcgagcagcgccttggcttcgtcgctccagagaatttcctcgtgcagccgagccggcgtcgggtcgacgcgatcgagttcggtcgccaggggcaggatattgaacaacgcgtcaaacagcgcgttgcagacttcctgaacgaggtaagttgcgcccgaataacccatgaacggcgtaccggtgtggcggcggatcaccgcgcccgggaaggacgccggcacatagatcgcccgaccgccagcttcggccaggtacattcgttcgttgtagctaccgaacaggatcagcggcggcttctcgcgcaccgcagatcgcaccgcatcgttatccggcttgacgcctgccttgcgcgcgaaagagaaggtgcacggcaagcccatttccttttccaggaagttcctgacgccccgcgcataagtctcgttggcaacgattgcgaagctggccgttccgaagaagtcctgcgttaccgaccgccacagatcccacagcggcttgatcgtggtgtgcttctcgcgtgcgatgaacggctcgggatcgagacccagaagttcgccgagcttgcgcaggaatctggtagtggagtgcaggccgatcggcgcctgcagatagggacgctccagcgcttcgcacagcatgcggccgaactcccggtacatgcaaacgttgacgtcggcattcacaagcttcggaatgtcggcgaggtgacttccgagtgggaacaccatattgatgtccgcgccgatgccctttatcagccggcggatctcggcaagatcggacggcatgttgaaggtgccgtagatcggcccgatgatattgacgcgaggtttgacgccttcggcgcggggtttgcgctctggtatcttcttgatgccatattccttccaaagccagacgatggcgcggtcggcgctctgccactgatcctcgtcgatggtgcgcggcaggaagcgcttgatattggttccttccggcgtcacgccgccgccgatcatttcggcgatcgatccggtcacaacgacggccggcatatagggatcgagcacgcggtgtgcgcgcttcatcgcgccttcggtgccggtctggccgagctcttcctcgccgaggcctgtcaccacgatcggcaactcgtgcggcggcaacgcatcggtatagtgcagcaccgaagtgaccggcaggttctcgcaaccgaccggaccatcgatgataacctgcatgcccttcaccgcggtgaaggcgtagaccgcgccccaatagccgcccgcgcgatcgtgatcgagtacgagcatcagatcatctcctcggctttgcgcttcttggccagggcttcgatctgcttcctatatttttcacggaagaccacgttttcattcggcgtatcttcccagatgcccgcggtgtggccttcgccgacatctccgaagaattccttcatctcgtcgaatcggctctgattggcgagcgcggcgttgacgacctgcgccaacgatccggcgccggcgaccccaaacagcggacgggccgaaatcagatttgtgaagtacagcgcaggaattgcgagctgcttggctttctgaacgaccggcgtggtgccgatggccagatcgggcttgaactcgccgacggcggccaggtccatttccagcgacgcgcggtactggacgcgggtgcccctggtttcgagccattcgcggtcgctgtccgaccattgcgtccttggacaggcggttccgacatagggtactcgggcgccgctctcgatgaggagccgcgcgaccagaagttcggagccctcgtaaccggagaccgtaatgcgcgcatcaatcggcttcgccgccagagcggccttgatcatcggcaggaagcgcttcttggcggcgtcgatcttttcgcctgcaacattgcaagccgcaccgattgattcgagccaggcttcggtaccgtcatgcccaaccggcgcggaacctactattttgcggccggccaattcgaactggcggaagctcgccgtgtagaacggatggatcgcggcaacgactgagccgtcgagcgcggcatagagttcgcgccactctctcgtcggcaccactggacctgccgcaagaccaagcggctccagcatcatgccgataccgacggggtcagcggggaacatctcgccgaccaaagtgactgtcggtcgttcgctcttgccgccgcgcggcgcctgcacgggcccctgctcgacctctttgcgggcatattcgagcatcgcggctgccagcacgtccttggcttcggcatgggtcggcacaccaaagccgggcacgtcgatgccgatgatacgcacaccgttgatttcatccggcagcagatcgaggggaacgccggacgcggtcggcacgcagagattggtaataatgatggcgtcgtacagcgcggggtcagcgagctcaaatacggcttcgcgaatgtcctcgaacaactttccggtaaccagcgtttccgaattgaagggcacgtagccgaccgttcgccgcgcaccatagaagtgcgaagtaaaggtcagcccatagacgcagcaggccgagcccgacaggatcgtcgcggttcgccgcatccggaggccgacccggagcgaaccgaacgcagggcacatgctctgcggctggtcgtgcggacctttggggtaatctgcagcatagcgatcaagaatttcgctttttcccgcagcgctggcggcagcctcgagttcagcagccccggcatgacaacccatgccatcgctctttgtctccgcggcgataactggggtcggcgcgacggcagcatccgtcgcagccgcgtcgaagtcgaggggctcgttgacgacggactcggcgattgcgccggtgtatcgcggcagaatgacgttcatgttgcgctccgcatcatgctctcgctcacgccgcgtcgtagacgacttcgagggacggcttgtcgacgaccggcttgccgcacatgtcttccatggtcgctggctcgagcacgacgccacggccgaccacttcccctttgaacaggccgagcaaaccgtcctgcgtcagcggcgccgggcgaaccggcggtgcaaggccgacatttgtcgcgagttcttcgaacagcgagctccactgcccgccaggcaaaccgatgatctcgtaattcgcgctcttcttgcggatgtcatcgtcggccgggattgccgcaaggacaggaatgccgaccgtcgcggcaaacgcggccgcctcgcccgtgccgtcgtccttgttgataaccatgccggcgacgccgacgttgcccccgagcttgcggaaatactccaccgccgagcagacgttgttggcgacgtagagcgattgcagatcgttcgagcccacgacgatcaccttctggcacatgtcgcgcgcgatcggcaggccgaagccaccgcagaccacgtcgcccaggaagtcgagcagcacgtagtcgaacccccactcgtggaatccgagcttctccagcaactcgaagccgtggatgataccgcggccgccgcagccgcgaccgacctcggggccgccgagctccatcgcaaacacgccgtcgcgcttgaagcagacgtcaccgatcttcacttcctccccggcgagcttcttcttcgatgacgtctcgatgatggtcggacaggcgcggccgccaaatagcagcgacgtggtgtcgctcttcgggtcgcagccgatcagcagcactttcttgccttgctgcgccatcatgtaagacaggttggccagcgtaaaactcttaccgatgccacccttgccatagatcgcaatgatctgggtttccttggtcgccggcgtcgtcaccggcgcatcgggctcgatcgacgcttccacccgcagagcatctttcatatttatgttcggcacgacattcatgagagcgaactccagttcaggaccattttcaggcacgcaggatcctcgaacgcggtccgataggcattcgacgcatccagggcgtcgtggtggtgcgtgatcaggccgtcgaacgagagccgcccggattcgatcagccttttgatcgcgacgagatccgacggctgccactccgcggcaacgcgaaggcgcgcctcgcgcatgaacgctggcggaaatgcgaaagacaatcgctcactgtaaaacccggccagcacgatctcgccgccgggcgcgatacgtccgattagagaatcgagcagacccgcatcgccgctgacatcgtagatgctcctgtagtcacgccgcgtatcatgctcgggatcgatcaccccgtagtcgacggcaccgccgacgcgcgctgggttcttctcccacacggtcggaggctcgttacgaaccgcgatggagatgcgcgcaagcagtcgccccagcacgccatgaccaacgatgcagtccggagcctgggcaccctgggccgcaatggcgtggtaggccgtcgccgcgagcgccagcaggattccgcgttcgccgagattttgatcgagcggtaccacgcgcttcgctgtcgccaccaggcgcgaagcggaagcaccgaacagtccgcgcacctcgccaaagcactttgcaccgggaacgaagacgcgttgccctggatgcaagccggtagcagttcccgcctcgaccacgcgaccgaccgactcgtacccgggcacgagcggatatcccatgcctggaaatggaggcatccggcccgaccacagcaaccgctccgtgccggtgctgacgccgctccagtcgacatcgacgacgacgtcgtcggcggttggaggagtcaaagcaagccgattgagctcgatctgctccggctgcctgagaacgaccgcgatggtctccatcgctcactccgatcttccacggatgcggagggactccgcaaatgtcatgctaaacttacattttagagtgtcaagtttgattaacgccaatcttgctctttcgtgcagtgatcacgctggccagcatcggcatcccgaccggccgtagcgcaacatcgataaagccggcctcggtgagcatgtcgcgcagccgcgcgaaggtccgggggcggccgctgcccatcgccaacagatagaaggcgaaataggcatccccgatcggctcggcgccgcggacgctagagatgggctcggcaatcagcagtgtgccatcaggcgacaaggcctggtgaaccgcgcgcaacaggaccatgatgctggcatcgtcatgatcgtggatcacgcgcaccagcgagacgacatcggcgccctcggggagagggttcgcaaggaaattccccccgatcgcgaccgcgcgtgatgacagacccgcggtgcgaaagcgttcgctggcctggtcgactaccgcgggcagatcgaacagcacgaatcgcagctttggtgcctgcaccgcgacggcggcgatgaaggagccgtcgccgccaccgatgtcgagcagacagcgatgtccgcggaacgaataagccgacaaaacctgctgcgagatcatcggctgcgacgccgccatcaacgcggtgtaaggcgtgatcgcgtcgcgtgacaaattggcggcgttgggattggcggcatagggccagtaggcgactagttgcccggcgccgacgtcaccgcgcagcagcgcgatcggatccctcaggtcttcgtacagcatcgcatgatgctctatcatggcgacgacaccgggattgcccctcagggctgcaccgagcgacccgagaccatagcagccgccagtacgacgctgcagcaattgcagcgagaccgccgcatcgagcagaatcaacgttgcgtcggtcggcaacggcacacgcgacgccagctctgccggactgagcgggccattcgccagctggtcgaacagcttcaaacggacacacgcgaacagaacctgcgaataaacaaagccggcgcagagatcgaacagcgcgcctgcacgccgccgcgcgatcggccgcgtcagcgcaaaactccaagcaaaacgctgaaatcttggatcggcgagtatcgaatcgcgccagcccagcacgcgatcatgcaaggacaaccgcgagatgcagcgcactgcctggatggcatccgcaccgcgtggcgcgtcggatgtcccatccccggcctcacgatgcgtgatcgcggccatggtggctatgcagcgaactgggcaagcttggccggcaccaggcgctgggcttccgagagcatgagcgaacgcaattcggcgccattgggacagggcgggatcgcatcaatcgcgccgcgcaccaggtcatgcaagcggtagagcgcgccatcgaggccgagttcgatcaccgcgctcggacgcccgagcgctaggtcgcggccgacgggcttgccaatctcatcttcgtctgaggccgcatcgcgaatatcgtcggcgacctgataggcctcgccgagcttctcaccgaccatccgccacggctcgcaatcggcgccggctgacgcggcgcctgcaacggtcgctgcggcgaacagcgcgccggtcttggcgcggtgataatgcgccagatcgatctcgtcttcacattcccacgcctggcccgcgacgatccccaatgggacgccgacggatcgagccaccgtcaaggtcagcgccgccagccgctccggcgtgcattgaagacgcgccagcgtctggaatgcgagcacgatcaatgcatctccggtgagaacagcgagcggctcgccgaacgctttgtgcacggagggacgtcctcgccgcgtctccgccgcgtcgaagcagggcaggtcgtcgtgcacgagcgaggcgcaatgtaacagttcgagcgccgcgccggcagcgttggtggcggcgggatgatcctcgccgcaggctgcggcaacgctatggcagagccttggccgtacgcgcgcaccacggggaaacaccgcataacgcatggccgccgccagccggggcggacagccgggaagctcggcctggccaatcgcttcgttgagtgcccgttcgatccggctggttacgtccatggcaagctcccgtgtttgtcacaagaaatgtcaatcttagttgtcgatagtagtgtaaatcaatatagacacatgtcaatgacgagccggagccggtgcaaccatgcccagagatcgtgttgtcgttgttggaagcggcgtcgcgggactggtctcagccttcgcgctcgcagcacgcggcctcgacgtcaccgttctcgaacgtgccgcctcgccgggtggcaagatgcgccagatcgcgatcggttcggcaaggattgacagcggcccgaccgtcttcacgatgcgctgggtattcgacgaactgttcgcggcagcaggccggaatttcgcagaccacgtccgcctgcgcccgctggatatcctggcgagacatgcctgggacgagcacgctcgtttcgatttgtttgccgatcaggaacgcactgtcgacgcgatcggggattttgcgggcgcgcgtgaagccgagggatatcgcgccttctgccgggatacccagcgcatctacaacattctcgaaaagcccttcctgcgtgcaccccagccgagcatgggcggactgatcggcgctgacggccttcacgggctgatacggctgcctcagatcaagccgttctcgtcgatgtgggcggcactgggacgatatttcgccgatccgaggctgcaacaattgttcggacgctacgcgacctattgcggctcgtcgccgtatctggcgcctgccacgctgatgctggttgcgcatgtcgagcacgagggcgtctggtccatcgacggcggtatgcacgcgcttgcgaaaacgctggcggattgcgcaagctcctttggcgccgtgatccggtgcggtgaagacgtcagcgaagttctggtctccggcggctacgccactggcgtaaggctcgcaagcggtgagcgcattgcggcggacgccgtgatcgtgaatgcagatgtcggcgccatcgccgacggaatgttcggcacgcctgcccgccgcgccgcaacggcgatcccgccccgtgcacgctcgttgtcagccgtgacatggagcctcgttgcagaaccggatggattcccgttgcaccggcacaatgtctttttctcgagcgaatatgcagctgagttcgacgatattttcgtgcacgaccggctgccgcgcgagccgacggtctatgtctgcgcccaggatcgcgacgaacacatcgcaccgggcggttccgagaaattcctgatcctcgtcaacgcgccagcgaatggcgaccgacatgtctacgatgcaatggagttggaaaaatgcgctcagcagacattcggcattctggaacaacgcggcctacgaatccagccgcaggcggatgcaatacaagtgacgacgccagcggatttcaaccggatgtttccggctacgggcggcgcgttgtacgggcgcagctcgcacggatggatagcctccttccagcgtcctggagcgcgaaccaggattccgggcctatacctggcggggggcagcacgcatccgggtccgggcgttccgatggcggcgctgtcgggccgatctgcagcagccagcctgatcgcggacctgacttctcgcgggtcgttccgccgaacggctatgcgtggtggtatatcgacgcgctaagcgacgacgggcataacggcatcacgatcattgcttttatcggcaatgttttttctccctactacgcattcgcacgccgcaagcggcctgccgatccgatcaaccattgcgccatcaatgttgcgatctatcgcagcggcggcaaccgctgggcgatgacggagcggccgcgcgaggcggtcagccgcacgatcgacacattcgcggtgggaccaagcaatctgtcctggaacggaagctcgctaaccatcaacgtcgacgaaatctctgttccgatccccggacgtctgcgcggcaccatccgattggtccccatggcggtcacgccgcaggtcttcctgctgaatccggcaggtcgtcatcaatggtggccgatcgcaccgttcgcacgcgtccaggtaagactcgatcatccccacctgagctggcagggtgacggctatttggacatgaaccacggcgatgaaccgctcgaacagggcttctcagattggcaatgggcacgcggagcgatgcaggacggcacggcgatcctctacgaagcggagcgccgcgacgggagccgggtcgacctggcgatgacgtttgatcgcaacggaagaatgcaggcgtttgagccaccaccaacagtgaagcttaggcgcacaggctggcgcgtcgcccgcagcgtgcgcagcgacggcgccgccaagatcgtcaagacgctggaagatgcgcctttctacgcccgctcggtgctctcggcgaagctcctgggcaagcccgtgactttgatccacgaaagcctctccctcgatcgcttcaagatgcccctcgtgcaggccatgctgccattccgcatgcctcgggcattgcggtaaacgaggcatcgcgtcagggcgattttgttccgtcggtttgtttcgcgcgttcggcttccttctttctgtcgagccgccggcaaaccagctcaagaacgccccatgccgccgcgaacatgagcaccacgaagaactcgacgaaaccgagatagctgtccatgatgtcgcctcgcacaactctccgcagctctcgcttcagcgcagatttggtttcagcagaaggctacgtccagctcaccaatggcggcatcgagctcaaaatggtttcgatattgcccccggtctgaagtccgaacatggtgccgcggtcgtagagcagattgaactcgacatagagaccacggcaggcaagctgctgcgcgcgctcggcgtcggtccagggctccagcatccgccggcgcacaatccgtggatagacatccagcaaagcaagcccgacgtcgcgcgtgaaggcaaaatccttggcgaagtcgccggtgttaagatggtcgtagaagatgccgccgacgccgcgcgactgctcgcgatggggcaggaagaagtaggtatccgcccacggcttgaacttgccgtagtaggctggatcatgggcgtcgcaggcctgtttcatcgccgcgtgaaacgcaacggcgtccggcgcgtgctgggttcgctgctccggcagcatcggcgtgagatccgcgccgccgccgaaccagccctttgccgtcgaaaggaaccgggtgttcatatgcactgtcggcacccgcgggctgcgcgggtgcatgatcaggctgatgctggtggagacatagtcgagctgaacgccgtcgcccggcagtgttttggccatctcgggcgtcagcctcccgttggccgatgacgtatggataccgatcttctcgaacagtctgccgccgctgaggaagccgccggtgccaccgccactgccggacgctcgcgtccacggcttgtaggtgaaggtgaccggctccccggaaaacagcgcggcgggcgcctcgcgctccagcagctcgacctcggcgcaaatcctgtcgcgcagcgattcgaaccatactttcgcttcggcgcgctgctgttcggcgagaccgtttctgccgtcgcggatgggctcggtcccgtacatcccatttgctctatcggtaggaggccatgcgctgcaactgatcgcggcgttcgagccgctcgaacaggtcgataacccagaccacgcggtcttcgatcggccgccgcggcttgacgttttcgcgcagcggcgttgccgcgacggcctcgaccaggaaacgagtctcttcgacagccgcggcttgggcgacaagattttgcgcaggctcccattccgcttgcggcaaaagcagcgttcgccccagcaccgcaatcttgcgattggtggagacgatcgcacgcctcgacaccgaatccagaccgctccgctccagttcgcggccaatctccgcataaagcgcgcgggccgcatagattcccgggcggcagccaatcggcagattggcgatcccgtgcgtcgcgcgggaatagaaaatatcggcagcatcgagcagccgctgtacgatggccgcgatctccggcgtgaaggacggagtctgcagccatgtgttcggatcgattcccgcctcgcgcagccacgattgcggcagatagagccggccggcgcgggcatcttcgccgacatcgcgggcaatgttggtaaactgcatcgcgacgccgagatcgcaggcgcgcgcgacgatctcgggggcgcgccgccccatgatcagtgtcatcatcgcgccgacggcacccgcgacgcgtgcggcataggccgtcagatcctgcaacgtctcatagcggcggacctctgcatcccatgcgagaccttcgagcaaggcttccggcagttcgcggggaatacagaactttgcgacaatttcggcgaacaggcgatctgcggcacggtccatcggcaggcgttgatacgcccggtcgagccggtcccgtaaccgcgccaccgcggatgcgcgatcatctccgagatcgaccgcatcatccgccaaacgacagaatgcgtagagcgcgatggcgggttcggcgacccggcgcggcagcaccttcgatgcggcattgaaagtccgagagccgcccttgagcagagcgcggcaggcagccatgtcgatgggatcgagccgtgtcgtcatgcggtcaccaggcttgcaaggtgtgaggcatcgggcaccagggaatccagaacccgtgccgaggagagcacaccaggcaggcccgctccaggatgcgtgccggcaccgaccaggtacagattttggatatcttcgctcttgttgtgcgggcgaaaccacgcgctttgagtcaagatcggctccagcccaaaggcggcgccgcgaaacgaggagagccggtcctggaaatcctgcggcgtcagcaggcgcgagctgacgatctcgtcctccagacccggcaatacagttctggcgagttcgcctgcaatcgccaggcgataatcttcggccatcacgctccagtcggttccgccttgcagatgcgggacaggtgaaagcacgtagaacgcgtcgcagccgtctggtgcgagggacgtgtccgtcgcagtcgggcgatgcaagtacaggctgaaatcatcggccagaaccttgcgatcaaaaatgtcggtgagcaagcgcttgtaacgcggccccagcaggatcgtgtggtgcggcactccatcgtatctgcggcgtgtgccgaagtaccagacgaacaagctcatagagtaacgtgcacgttcgatgcgcctatcggtccagcgcgatcgcgccgacgcaggtacgagatgccgataagtccatgcggaatcggcgtttgacaccacgatatcggcagcgacggtctcgcccgattccagccaaacgccccgcgcaacaccgtcgttcacgacgatttcgcggaccccctggttgcagcagagtctgccaccctggccctcgatcagcctgaccagcccatcaaccagccgcccggtgccgccaagcgcaaaatgcacgccccagcaccgctccagaaatgcgatcaagcaatagatcgaactcgcagtgaggggatttccgccgatcaacaacggatgaaagctgaacacgacgcgcaggcgcggatcgctgaagaatttcgaaaccagcgagtagacactgcgatagctcgacaaccgcagcatctcaggcgcgatcttcgccatgtcggtccatttgctgaacggcacgtcgccgagcctctcgaagccgaccttgaagatctcttcgctggccttcatgtatgcgtcgtagccgtcaacgtcgccaggcgaaaatcgagcgatcgcgccgcgcatcgccccggcatcgccggaatagtcgaagtgcgatccgtcgtgaaaccggatccgataaaacggcgagaccggcaccagagtcacgtcgtcggacatctttagtccgcacagcttccacaattcctcgaacagaaacggtgcggtgacgatggtaggccctgcgtcaaaggtgaagccgtcctgccggtacacgtaggcacggccgccgggggcatcgagcttttcgaggacggtgacgcgatagccttttgcgccgagccggattgcggctgccaatccgccaaaaccgctgccgatcaccaccgcgtgcggttggcgctgcgacggcgccgatggcgtcgattggactgagattgaatccagcataagaccactgtaattatttattgacacctgcctagcctgaaagtgtacattctaaggtacaatttttgtgccgcttgctcggcggagtttgcgtgggcgtatttcataatgagctccgtgatcagttgcggctgctcttcgtgcgcgagatgaccgaggcccggcagccgctcgatgacggcacttggaagaatctcgcgaacctgacgtgcgacctcgggcgatatcgagcgatcattggtggcggccaccaggaccagcgctgtcgtcagccgcggcagatcgtgcagcaacggttcgagtttccagttcgccatcatccgaagtgcggccgcaacatgcgcaggattccggaccagcttacgatagagtgcaatcccatcctgatcgattgtcgaaccggtgttggcgatcaaccgctcgaccgcgccggcatgagatgcctgccaagcgaacacgcgtggcaccaatggattcagcaccagcagattcgccaggggcgaaaacagatggttggcgattccgccgaacggcatgaatgcgccattcagggcgattagcaggcgcggcgccgtgcggcgggcgagacacatgcgtgccgctatcgccgcccctgcggaatgaccgaccgtgatctccggcctcacctccagtttgcggagctgtatgccgaggtcggccgccatgcccggcagcgacaaccgatacgacggtggtgattgcgtaaatccatgtccgggcagatccggcgcaaccaccgagaaatgcctggccagcagtggtaacatgtcgcgccaggaatgcgttgcggctccggtgccgtggatcaggagcagcgatggcccctcgcccattcgctgcacatgccagcggatcccggccgcttcgacgaacacactggcatttcggttgggccagtccgtaccatcgcggctccaaacgagaccggacacggcagaccctcatgcgcgcgatgccgacggcacgccggcaaggaacgtgtcataggccgcaatgaattcggcctcggcttcgaaatgcggcatcgcaccggtcgggaacacgcaaacggtccaattggcgcggccctcaacctgggttttgttggagtagtcgacgaagtcgccgcgcacgccgtggctcatccagaccggaagtgtcagcgagtgatagatgctaataatgtcctcactgaacagaaatccggatacgaaataatacggcgcatgctgtgcgccgggttgtcgcgtcgtcaggtagtcgtattcaagcaagccctcgtcgatattacgcgagccccaggtcttgctcaggaagtagcggattccggcacggctggttagcaagcggaagaagccttcgctccaaagagaaaattcgaagagagcgtgaagccacggcttgccgcgcgtgccgtcgcgccatgatgtggtcttgtcgctgctcctgaaaccggtggggctaaccaaggctgcgctgcgaaacgccagcggcgcctcgctgactgccctggcgagaaattccgacgatagcgacaccgccaatgcgtcaaccgggccgcgcccgtgatcgttctggatctcgcgtatcgcgatcagaatcgcgtcggtcatcatgcggacggtgtattcgcgctttccccgctccgaatgaccgaagcccggaagctccaaagcgtagaccgtccggcttccgcggtagtgttcgtaaagcggcttgatctcgtaagcggagcccgcggcattgatgctgtgaacgagcaatagcggtgggaactcgccaggagtttcgggagtagctgaatagtatgtcagtctcccaaccgaactgccgatctcgtggcgctggccggacacgggcgcgggtaactcgtccgcgccacgcgaagcggcaggggtgatcgccggggcggctgcgctcatcgcaaatctcctttttcctgccagatcgcatctcgccgtggccaagaccgtaacagcagtgtatcaggactgacaatcatagttgtcggccagaaacggaaatgccgcttgacacaagctccacccatcaaaccgttgctggaagtgctttccgggcggcggcaggcggttccgccgctctggatgatgcgtcaggccggccgctacttgcccgaataccgcgacgttcgcgccagggccggcggctttctcgatctctgcttcacaccagaactcgctgccgaagtaacgctgcaaccgatccgccgtttcaatttcgacgccgcgatcatcttctcggatattctcgtcatcccctatgcgttgggtcgcaacgtcaggttcgaagtcggcgaaggaccgcggctcgatcccttggacacgccggacaaggttcgcacactttcctcgaccggggatttcaccaagctcgagctggtattcgaggcgctgcgccgggtacgccgtgaactcgatccgaggatcacgctgatcggattctgtggcgcgccttggacggtcgctacctacatggtcgcggggcgcggcacaccggatcaggcgccggcgcgcatgatggcctatcgccaacccgaggcattttcgcagatcatcgacgctctcgtcgagaactcgattcgctacctgctcgggcagctcgccgccggcgccgacgtcctgcagattttcgacacctgggccggtgttctcccaccgcgcgaattcctgcgctggtcggtcgaaccgacccggcgcattgtcgagggtgtccgcagtaaggtgccgggcgcgaggatcatcggcttcccgcggggcgccgccgcgttgctgcctgggtatgtcgatgcaaccggagtcgacgcggtcagcatcgactggacggcggaaccgtcgctgatacgtgaacggattcaaacgcgcgttgcggtgcagggcaatcttgatccactggtattgatcacgggcggtgacgcgctgaatcgcggagttgatgacgtgttggcgaatttcgcgggagggcgactgatcttcaaccttggccacggcatccagccggaaaccccgatcgcgcatgtggagcagatgataaagcgggttcgggcctacaaggcatcgctttagccgacgctggcgagcacggcctttgacaaggtcgcggcgtcggcgtgcggcagcggcagatagcgcgcgcccatttctttggcgatagcttctcctgaaacgcccggacgcggcgacgtatcgacgagtacaactgcaataccggcgccgcgcaactgtcgcgctgcgctcaccgcgtcgtcctcggcacgcggacgcccctgcccgccatcgcgtgcaatgttggcgcggccgtcggtcagaacgatcactgtcggcgtttgtcccttgcgacgaaccgagtccgacagcataaaggccgcatctaggcctgcggccaggggcgtgccgcccccgcccggcagtcctgcaaggctacgtttggcgcgtgccagcgaacgggtcggcggcagcagcatttccgcggcgctgccgcgaaacgcaatcaatgccacctggtcgcgccggatgtagcaatccgccaaaagcagttcgaccgcacccttggcttccgccagccgatgcaatgctgcggacccggacgcgtcgaccacgaaaatcgtgacagtttccgtgcgctgcttgaaccgtgagatgcggaaatcgtccttgcggatcagaatgcggggccgggcttcctcgcccgacccatccgcttcccggcgtcgcaaaggctgccatggcgccgctgcgcgcaaggtttcgatcacgttgagcctcacgccgccacgcaatgcgtcgcgcaagacgccggccggacggccgcgtgagctggatttctgcaatgcgccggccttgccggaggaacgactgcgcgaacgtccggcagatcccgcgcgaagtgccgccagcacatccggcgggattgccgcctgcacagcggccagaatgacttcgtcgagggcacgatcgttggttggcgtttgatctttaccaccggacgcttcggcctcatcttcggtcggcggcggaggctgctcgggttgggccggctcctccgctggcggaaacaccggcacacggggcgcgagcaccagccgcgcggccaaagcgagatcatcttgttcgactctggagtgacccgcaagcgcggcactggcgcaggcgatacgcagcgcgagcaacggcgcacgcaacgacgctatgcctaacgctatggccgccgcacaaactgcctcgatctggaccacgtcgggcttgagagatggcaacttcgcacgtgccgcagctgtttccccggcatcagcagagaattcctcggcgtctcggacgccgattgcgttgagatcgaggtggagcgccagacgatcgcgcagcgacgccggcgcgaattcgtcctcaaggccttcgtccaatgcgatcacaccgaaacgagcaggcatccgaagggacagtccgtcgcgctcgacgatggtctccccagcgtccatcgccgctgtgacatgcaccgtcattgcggccgatagccgctctgccatcgccaacatgatcacgccaccgtccgcttctgccaagagcccgcgttcggcaacaggtcggccgttcagtagagtcgcgttgaggtccaatccgccgagcagccggccctcagcgatattcagcggcacttgcttcacattgcaggatgccggcagtgccaaacgaagcaaggcgaaccaacgatctcgcactgggcctgcgcgtgatctcagtaacacgcccccggtccctgacgggtccaccgcaaacaattgcgccgctgtcaccgcgtcggaccaaacgggggcgccggtcaccccagcacctccaaaatcgcacggtcgacccgtaccgaggagcccgcatcatcgagcggattgcgccgcagccgatggcgcagggccgagggagcgatccggcggagatgatcgtcggtcacggccttggcggagtccagtgtcgctagcgcacgggccgcacgcatcaaggtcaattcgccgcgcaggccgtcggtgccaagcgccatgcagagtttggcggcgcgctcgagcgtgacatcaggcaccgaaaccgaggagagtttctcccgcgccatgatgatcttcttgcgaagcatggcctcgtccttggcccactttgtgacgaaggcttcgctatcgttttcaaaagcgtcacggcgccgcaccacctcgatccggtccgcaagattgtcgggggtcttcacctctaccgacatgccaaagcgatccagcaattgcgggcgcaactcgccttcctctgggtttccagtaccgaccagcacgaatctcgccggatgacgtatgctcaagccctcgcgctcgacaacattttcgcctgatgcagcgacgtcaagcaggagatcgacaagatgatcctccagcagatttgcttcgtcgatatagaggaacccgcgatgggcgcgagccaacaaaccaggctcgaaggccttttccccgcgcgtcagtgcccgttccagatcgagcgcgccgaccacgcgatcctcggtcgcgccaagcggcagatcgacgacgggcaccgggacctgtaccgactttagtctacccttgctcgcccgaacgcggcaattctcgcaaagttccaccggccgatccggatcgcaattgtaacggcaacccacgacgatcttcatcttcggcagcagggcggcaagcgcgcggaccgccgtggattttccggagccgcggtcgccaaaggccagtacaccgccgacctttggatcgacagcggcaatcagcagcgcaagcttcatctcgtcctgaccgacaaccgcggagaagggaaatgctgctgccatgctatgctctcagtgctccggacgcgttcgcgcaatgatgtcggcggcgcctttgtcaagcagctcaagcccgaccgcgcgaccgagttcgcgcgggcggtttgcagcgcccgaacgggtcacctcgatgaactggcccccgcccgcttcatccaaaaccgaggctgtgagcgtcatctgcgaaccttcgatggtcgaatatccagctatgggtgaattgcagtggccgttgagaacccacaacacctcgcgctccgcatcgcaactgagatgcgacgcagaatcgtcgatcagagcgagatgccgccgcgtctgccaatcattgaccgcgcactcgacggccacgataccctgccccactgctggcaacatttccgaaggcgacagctcgcaggcaatacgatggccgaggccgatccgttcgagcccggatcgagccatgatcaaagcatcggccggtcccgcctcgccgccacgaggcaaccgttgcatatcccgattgtccagtttgcgaactctggtatcggccgcaccgcgaaagtggatcacttcgatgtccggaaacagtcgcctggcataagctgcgcgccgcacagcgttggtgccgatccggtagcccttgccacgtgagcgcttgatgtcatcgagagagacgcccggcctcagcaccagcgcatcggtcggcggatcacgcggcagtgtcgcaccgatcacgagccccggcgtgtcctcattgccaggcatgtccttgagcgaatgcatcgctgcatgaagccggcccgatgtaacggcggcgcggatttcagccacgaaggcgccgcccttcccgccgtggaccagaagcttgctggtctgatccccgtcgccggtagtctcgaacctgacgatctcgacgtctaattcggacgcggccttggataggcgctgcgcaacatcttcggtctgggtcaacgccatgacgctcttgcgcgtgcctatccgcatcgagactgtcaccaccacgctccaatccgcagccgcacgacgcgccgcgggcagagattaaggccaaccgttgccggaatgcaaaccaaggccagcgtgcggtgcacacgccaattcaagacacaatatcgcagaatatacgagccaatcatccggcgtttcacagcgcgccagatttttttgccgaagcactccgatctcttcctgcttctgcggggcacgacggagtgttactcctatcgctgcggagctcggatgcaacaagccgccggaaatcgagatcgcgatgagcgcggatgtcctgataggtgacggcggagcggtgcggctgacacctcatccgttgcgtgcagccgtactcggcgaggttcatgctcgccctttcacaccggtttcggtgccatcacgcatcgtgcattttgccttcgatacgtcgggggcacgtgcgcaggccgaccgcgccaatctgatcgcattctgcacgtcgcgcgggctgcagccgccgtctcctggcgaaaggcatcatcgtgcaccgttcggcaccaccgtgctgcgatgggaacagcattccgaattcacgacctatacctgggaaatgccggccgatcccgcggccgcgccgttccatccggacgcggcctcgctggcgctgccaatgcggctcttcgcgcagcccggcccgctgctggtggccgtcgatctgcatcttctgagcgaggacccgcaacgaaccgcgcccgaacgcctcttcgacaaagccagtctggccgtggccgagaactcggacggcgccgcggtctacgccaccgacttccagccgggaccatccggctttgtccgcatcctcgttgccaaccgtacgatgtcgccggaccgcgccggggctttggtccgacgggtgatcgaactcgaaacatatcgcacgctggcgctgctcggcctgcctgaagcgcaacggctgtcgccatcgatcgcagcggtggagcgccgcctcgtcgaggtcacagaccagatgcgccgcgccggcgatctcgccgccaaccacaagctgctcgacgagctgactgccctggcggccgaggtcgaagcgggggcagccgccagtgtgtttcggtttggcgccagccgcgcctatgaagagatcgtcgagcaacgcctgcaaaccattggcgaacgcaaggtcggcggcctcccgacgtggtcgtcgtttcttgcacgccggatgaagcccgcgctacgcacatgcgtcaccgccgaggcgcggcaatccagcctgtcgttgaaactcgcacgcgccgcaaacctgctgcgtacgcgcgtcgacgtcgagctcgaacagcagaatcaggagctgctgaagtcgatgaatgcgcggacgcgactgcaactgcgactgcaggctacggtggaaggcctgtcggtcgcggcgatcacctattacgtggtgagcttgttcggatacatcgccaaggcggcgcatgacagcggcactattgatctcgagcccagcgtcgcgacggccgccttcgttccggtcgccggctttgcgatctggtggacggtgcacagcatccgcaggaagcacattgccggcgaagatccatgaggttctttgttggattcatcgcgatcgcggcgatcctgatcgggcttttcaaattgcatgaaggcagccgggacctgaacatcacgcggaccgtcgtcagcgacactccggtcacgatcttcagacggcaatccgcgttgcccgcgcctgtcgtcgtgatcgcccacggctttgctggttcgcagcagttaatgcagccgtttgccgaaacgcttgcgcgcaacggctacatcgccgtgactttcgattttctcggccatggccgcaacccggtcccgatgcatggcgatatcaccaaaggcttgacgatcaccaacgcgttgctgaaggagctgaccgacgtcgcggcgttggctcgcggactgccagggagcaatagccggctcgcggtgctcggacattcgatggcgtccgacatcgtggtccggttcgcgcaggcccaaccggacgtcgaggcgacggtcgcggtatccgtgttttcgcccgtggttacgccgtccagcccgcgaaatctgctggtcatcgtcggcgcgctggagcctgcgatgctcaggaatgagggcctgcgcatcgtcaatctgacaaccggcggcacggcaatccctggcgagacttacgggcaattctacgacggcaccgcgcgcaagctggtgctggcgcgtggcgtcgaacatattggcgtgctctacagtcatgacggcatggtcgaagccgcacgctggttgaatgcggtcttcggcgatcggccgcaggaggaagtcgacagccgcgggcgctggttggcgctggtgtttgccggaatcgttggactggcctggccgttgtcggcattgttgccggaggtcagcccacgcccagtcggcgcgagcctccgctggaagacgctgatgacggcagcgctgctgcccgcgatcgtgaccccattgttgctctggaagatgccgactgactttctgccgatcctgcttggcgattatctgatgctgcattttctggtgtatggaactttctcgaccgcgatactcgtgtacttgcgcagcaagcaaccgccggccactgcgacgaatgtcgcctggacacgcgccgcgatcgcggccgccgccgtgtccgcctacaacgtcctggccttcggccttcccatcgacgcctatgtgttttcgttcctgccgattccggcccggctgccgctgatcgccgcaatcgcatgtgggacgctgccctatttcatcgccgacgaatggctgacacgtggtagcgagtcccgtatcggcgcgtacgctttcaccaaattctgtttcctgacctcgctcgccattgccgttgcgctcgacccaatgaaactgttcttccttgtcattatcttgcctgcgatcctgttgctgtttacggccttcgggctgatcagccgctggagctacgcggcgacccgccacccgtttcctggcgctctcgccaacggcgcgctgttcgcatgggcgatcgccgtaacctttcccatgatcgtgcgatgagtattgcccgaacgacaccttcttggagtggacgagacatgtggagacctaagcgcatcgaacccgcggctggacaggagtcagtttgggattatccccgtccgccgcggctggagaaaatcggcgcacggctgcgcgtcattttcaacgcacgcacagtcgccgatacgacggcgggctatcgcgtgctcgagaccagtcatccgccggtttactacatcccgcccgacgatatcgcgccacaatatctgatggatgcgccgggcggctcgtggtgcgaattcaaggggcacgcaaaatactggtcgcttgatgtcgatggacggacgtccgaacgcgcagcttggagctacccttcgccgtcacttgctttttccgatatcgcggatcacatcgctttttatgcttcgcgcgtcgatgaatgctgggtggacgacgaacgcgtgcagcctcaggaaggcgacttctacggcggctggatcacctcgcgcatcgtcggaccgttcaagggcggcgcagggactcgcggatggtagagtacgaatctcctgctggtcatcgctacttcgtttgtctcgtcgaactgttcgcgagcccaatcccggtatttaatgaggtcggggcagcgcgggtgtcgcgggattgatcggctggtagagtttcggcggatcagaccgaccggctgtggcgtgcctgtgtttgcgccaccaaccggcgtagttgcttgtgcggcttcggtgcgggatttgccgttgtagtcgaccgtgagccggcctatcgcggcgagcgcgaggacggcgaaaccagttagttcgggtccagcccgctcggcgcgacgcgcgccacttccgttgccttcaggcgcatttgccgcgatttcgcggttggtgggatcgcagaaaatagatgaatcttccggcaatgatgaatgtcgtggccgcgagagtgaataacatcatccaggtgattggatcgcgccttggacgagcggcatcgattgtacgattgggatgacaataggagcgattggacctcgtcataaagaaaggctccacccgtcccaaatccgggaaaaattaaaaaaagacgctatttctgtgctttctcgcgcgccacgcccagcattgtcagagccgtatgtaaactctagttgacagtcacatgtgtgtcggagaacttgagatcttacggaattgcggggcagctcagagggggatgacatggcgtcaatgaacgactgccgcatagagcggtccgatccgaccgagcttgagcagctcctgcagggtatggtggaaggccacgagccggccttcgaaaagctgcacgcggccacgcgacgcaagctgttctccaccgtcttggtggtcgtaaggcgccggcatctcgcggaggagatcgtgcaggaggcctatgttcgcatctggttgaacgcagccggatatcgtcgggcgttgggctcgcccatgatgtggatgatcacgatcgctaaaaacctcgcgatcgacgccgtgcgaaggccgtcgcgagaaatctatcgcgaccattccgccctgctggactttccagccgacacacccacggcgctggagagcatggaaagcaaggaaaacgaaagcgacaccgtcaagcttcagcagagcatgttgtccgctctgcaaacgctcgacccgacccggcgtcatctggtgatcgcggcttatctctacggtgagagccggcagcggctggccgagcagtatggcgttcccgtcaacaccatcaagacctggctgcggcgcgcgctgctgcaggtacgggcgcagatcggggcaatggcgctgggcgatcttgctctcctcgttgacggcatacgagaacagcaacttgaagaccgcgtaggttcagagatcgaaatcggtctcttgtagatggttcagtcaacgcagctcaaggtcagaaatctcgtcctcgtactcggcgaccagcttgacgcggattcagccgcgttcgatgggttcgaccacgatctcgacgtagttatgcagatggaggtaaacgaggaagcgacctacataacacagcataagcttcgtatagcttacttttttgcctcgatgcgccattttcgggaggaaatgatcgcacggcggcggcgcgttcgctatattgccatcgacgatccctcgaacacgggaacgttcgaaaccgaaatcgtccgagcccaacagtcgcttagccccgagcgtacgatcgtcttggagccgggcgactggcgtatcgccgagaagctcaagcgacttccgcaaccgcctgagttccgacgcgaccggcatttcttcagctcacaggaagatttcacagccttcacgcgcgacaatcctggacatatcctggagaccttctaccgccatatgcggaggaaaaccggactattgatggaccagactaccggcaagccaattggatcggcctggaacttcgacgagcagaacagaaagccgtttggtagaaacccgcccgttattcctccggtgagaccctgcaggatggatcccatcagcagagacgttcgcgatctcgttttaaagcgctttgtgggcagcccaggtagactcgaaacgatcgacctcccggtgtcgcgcgcccaagcactcaagcaactcgacgacttcgtttccgaaaggcttcctctcttcgggacctatcaggatgcgatgagaaacggcgaaccatttctctatcattcacgcctttctggccccttgaatctgcatcttctgacgccggccgaggtcataggagctgcgctcaagagcaaggacgctcctctcaatgcgatcgagggcttcgtccgtcagattcttgggtggagagaatacgtacgaggcatctattggcaacgcatgcctcattatgccgacgagaacgaattgaatgcacatcttcgcatgccgcggttttattggaccggcgacaccgagatgagatgtctcgctgacgcgatcgcgcacaccatcgatcatgcctatgcccatcacatcgaacgactcatggtgttggggctttttgcgctgctgcttggcgtcgcaccatacgaagtacatcgttggcacatgtcgatgttttgggatgcgatcgactgggtatccctacctaatacgctcggaatgagccaatacggcgacggaggcgtaatggggacaaaaccttacgccgcatcaggcaactatatcaaccgaatgagcgatcattgcaaaaactgtcggttcgatccgaagaagtcggttggggacgatgcctgcccattcaccaccctctattggaatttccttgccaagcaccgcaaacggctcgtttccaacggtcgaatgacaaatcattatcgaaaccttgatcgcagggatcgcagcgaattgagggctattagaagccgcgcggacgagattgaggcgaaaccgccgtaattcatgggttcagtaagacgagaccggcattcaaagcagaggcgaaagatacccacagtgtgtggggctcgaacaatatcaccgagaatcgatcacgagaccattggtgcgtcatgaaagccaggatgatcgccagcattcgacgataatgaccaacgcgcttctcggccggtaagctatggccaacatcgggcggcagctccaattcacgcggagaacctaaagcatgatccggaaaagcgcgaagcggttttccgaaagatcatgctcaaacaaagggctgaagcgcgatgacgattcgaccaaatcccatcgcgccatagagacgcccatggcaaagccgactgatcgccaggccgaggcaaccaacaggtcggatcgtgcacgttaccgatcattttccttacggatcaggtatgcgccggtaggcgacacaacacggcggaaaaacttgagagtaagaagctactgacctggtccttctccggacgcccgcaacgccgcaagtccctcgcgataggttggatagttgaggttcacgccaagttcttctcgaataagagcattcctcacacgacggttttcattataaaagctgcgcgccatcggcgagagatcggccttctcgaagggaataccgggcggaggatccaatccacaaagtttggacgcgtactccacgacatcctgcggaggggccggctcgttgtcgcagacgttgtagattccgcccggccgcggcttcgccagcgatgcttcgatcacggcgacaatgtccgccacgtgaatacggttgaatacttggccaggcttgatgatccgccgcgccgttcccgccgctagttgcgccagctggtttcggcccggaccgtatataccggcaagccggaaaacgtgagagcccaaggcaagccaatccttctcggcatgaactctgagtcgcgagcggccttttccaggctcggtcgccgtccgctcatcgacccaaccgccggcttggtcaccgtatacggcgaccgtggaaagatagccaacccaacgcaatttcgacgcttcggcgatatagcccgaaaaggattcgagcaccggatcaccacactctccgggcggtaccgagaccaaaacagcgtcgctcgatctgacatcctcagcgatctgctcatcgatatggtcagatgaaaaaactcgcgccgcaatgcgcgcctgaatcaaaccaatggccttcgcgcgcgaacgcaccgttgcggtgacctcgcaccccgcacgctgtagagcatacgagatatgcaaagctgagtaaccaaggccgaacaccaagactttcatgcgcgcactatacttcagcacgtaacccagttcatccagccaacttgccgaatttgaatatgttcgggcgaaaatcctgtcagatgtgcatcgctggtttgatcggcggagcgatgagctgaatcacagttatccgccgggcacttggactttcattttctctagattacacctttccgagattaatctctctcaaaatatcgcgcaaatatgaagattggcatcaaatgctccgcggtcaacgccagtcgtccgcttcgaagctggtgatccgcttccagcacgcagtcgttacggaaatgattgcgacgttttgcgcgcggttatgaaaaatttcggtgtttgtggcatgattaaaaacattgcgactcggcttggcagttattcggatcacccggaaccgcgctgctcactggccggcaagactgcgcttatggtggctttcaaccagcctttctatccgctctatatgcacgcgatcgttgggccggcggcctggccggcatggctgaccctgttgacgacaccggtcttcctcgccgtgcctgcgctggctaagcggcattcgctggcaggtcgcgtgctgcttccgctagtcggagtggcaaacaccgcgttctgcgtcaagctgttcggtgctgcgtcgggagtcgagctattcctgatcccctgcgcgctgcttggcacgatcttgtttcggccggacgaacgcctgaaggctgcgatcgtcgcggcattacccttcatcacctatctcttcatcgatgcccatctaggtcgaccgttgatgttgacgtctgactattcaagcctcgtcgccctgaacggaatgagcgcggcagcactgatcgccgttatcgggttgttctgctcggcgcttctggcggcacaagacgtctgcgcgccagatagcggaatgacctcgccatcggcgcgctgtgggtgctggggtgtttcggccacggccagatcaagtcgtcgaaggcgcggactgtggcagaagtagaccggacatccgcagaccgggcagtgggcgttcgggttgacttagctctcgatcgtcccgcggctgtcccgtgcccatccgagggaaagcggtgcgtagggcggctcattcgctctgccgccgcatagctcaccgatcgcctttaaaggcttgtggtgagcttttagttctccatcgagacgaatgagacccgagcgcaaattgcgctaagtcgctctcttagcgagtgggccaccccgccaattgagaccagatacggcctcgtcttgaaattggccgctgctcgatggaaagttcaggatggtgaccctcgtgtccgtactcgcaaaatgtcaaccgtcccgaacggagcattcagtcaccgctatcgcttcaatagttcgccaacccctacgccgagagctttagccaactgagctgctgccggtttgatggacaccaagattgggtgtttcatgaaggcggaggtgggcgatgaagagacggaagttcagtcgcgagttcaagatcgaggcggtcaagctggtcagggagcgtggggtgtcggtggcgcaggccgggcgcgacctggatgttcatgagaacgttctgcgcaaatgggtgaaagagttcagctccgaccctgtgcaggcctttcccggccaaggccagatgaagcccgagcagcaggagatcgagcggctgcgccgtgaggtcgccaggctgaaggccgagcgggacatcctaaaaaaggccgcagcctacttcgcgaaggaagcgacatgaagttcgtctttatcgcgaagcaccggacgatctggccggtggcatggctatgcgatgtgctgggggtatcgcggtcgggcttccatgcctggatgaaccgttctcccagcgccaggtcccgcagcgacgaggagctgggcggcaaggtcaagaccagcttcaccgccagcgaccgcacctatggcgctcgccgggtctggcgcgatctgctcgccgatggggtggattgcggcctgcaccggatcgagcggctgatgcgcctgcagggcttgcgggcgcggccgcggcggcggcgcttgccgaaggatggcggcgatcgacagctcgacaccgtaccggccaacctgctggaccggcagtttgtcgccgagcgtccgaaccagaagtggatcgccgacttcacctacctatggaccgtcgagggctggctctatgtcgcggcggtgattgatttgttctcacgtcgggtggtgggctggtcgatgagcgccgcgatgacggcgcagctcgtaaccgacgcactgctgatggccgtctggcgacgcggcaagccggatgcgctgttgcatcactccgaccagggcagccagtacaccagcgagcagttccagagcctgatggccgaccacggcatggtctgcagcatgagccgttccggcaatgtctgggacaatgcggcgatggagagcttcttctcatcgctcaagaccgaacggaccgccaacaagatctacaggaccagagatgaggcacgagccgatgtgttcgactacatcgaaagattctacaacacgacccgcaggcactcgaccatcggttatctcagcccagttgagttcgagcgcagggtgggattagcttaacccggtgtccatcaaaccggcagcagctcaaatgcgcctttgacgcccaaaggtcgagaggcgatggtccaaagcgtggtgggaggcggcctaagccaggctggcgcagccgagctgttcaacacgacgccgaagacggtcgccaaatgggtcaagcgcttccgcgcagaaggtgtggagggattgcgagatcgctcctccaggcccctttcatcgccaagccaaacccctctcgccacgtgcacggcgatcgaggccttgcgccggcagcgccacaccggcaagcaaatcgcagccgaggtcgaggtgtcgccggctaccggcagccagccggttgccgccagcagctgctcgggggcggccgccatctcggtcgttttcatgcccgacaagcgctccgcggcctcctcgctgacgccatcacggacggcctccagaatgccagctttggtgacgcggccaagatagctgccgactgtcggccgccaatatccggtcatgtcgagggcaactgcctcggccaaatgccgggctgccgcgagggcgcgcggcctccggtcgaacggcagtctgaccgcgttgacggtcaatgccgtgcaatgcgcgaacaggaacatgcggctgtcgtgatcgagttcggccacgaactcccacagcccgctggggtccttgggcatctgcctcgcccaattggcatgccgatccgaccatgccttaccggccgccgtatcctcgattccggccgcatggacagccaaatccgtcttcaccggttgcatgccgaccacatgagcattggccccaaaatagaaaatctgggccgccagcgcatgggtcaccgccacgatggcgacctccggctgctcactcagattgaggcgcagccccaaggtgcgatgcgcggtgaggtcgcgaatgagcatgtcagacagccgttgatcctcgccctccttgtcgctggcactttcctcttcttcaccgtcgtgcgcagcttcgacgcctccttcgccctcctctttcgctgcctgagcatcgccttcatgccccgttgcagcgtggggtttctcgtcctcgggacggataaaaccgcgctcgatactgatagcgccgtcatgattgaggaccacgaaggcgccgccgcgcgcgacgtcggcgggatcgtaggcctgccgctttgcctccagccgatcgatttcggtctccagctcgccgaaccgcgcgtcgacgtcgtcgggcaattcctcggccgtctgatgctgctcggtcagccggtcgaactcgctctgaacggcctcaagcgcggcctgatcctccgccgacagctcgaccggatgcgggtaggtccgacgcatgccgtgggcgtgcggaaagtcgagatggggctccgtccacttccagcactcggtcgcccgcaaccgatccgcctcgcggccaagccttgccgtgaccagcagatcgagcagcgcgacgtcttccagatagccgccgcgatcctcggtaaagaggtcgcgcagcacggtgccgcccgcctccgtataagcctcgagcccgacaaagcgcgcccggcgatcggtggcagccacgtgggtttcggtgagcagacggcggatggtggcagcatccgggtcgaagggcaggcgctcatagagggcttcctgccgcgcatgatcatcggtgacggcaaacgccatcagttgctcaagcgtcagatcgccaccgcgatagagctgcaccaatttggacgaaaccgcgccgagccgcaggcgttgccgcaccgcatgcgcagtgacgccgaagcgcgccgcgatctcctccacaccaaaaccacgctcgtccgcaagcttcttgaaagcctcaaactgatcggccgggtgcatgctttcccgagtgacgttctcgtccaggctgatttcgtgggggtcgttcgcggtatcgatgacgcagcggatcggttcgtttttcttgatttccttgcgcttcacccgcagcagctgggccagccgccgaccctcgccgatagtcacgcaaaagaaccccgtcgccgccccctcgccatcggcctccggctcgacaaccagattctgcaggatgcctttgagggcgatgctcgccgccaacgcctcgattgccgcctcgctgtgcggcgtcttgcgcgcattcttcggcgacttcttgagcttgccgagaggaatgcgaacctcagttccacaaggtattccaaatgttttggccgacatgatcaaacttccttttgcttccatgggtgcaaggcgcaccacgcgcctgcacccctgcccgtcggcgagaccgggggtagcgagcgccagggcgacccgagcggagggggatcgcccgcccgaagggccgcttcgtgagaagcgggtctgcacaagcgtgtgccaaatcatcgaaagtcgacaacgtgaaagcagcacggaagaccggggagaccgctcggggcggcgccggcgaaagccggcgctttaccctggcgcgcgcgaggggcagcgccccttcaatgtcttcattcaagaaaaaagacgcaaagcggccgtcgccgcaccgaaggtgcggtggttaggtgatagcaatggtgtggtgctctcaagcgtgagattgctgggcaaagcaaaggaagtgtaatcaagccaagagtgaccaaatcaaagagcagccgacgagagggcagtgatagcgacgcgggcatgcaatgaccgcgggcaccgaggcgactgcagttgcgagaccggtctaaaatggcacccgagcgcgggacagtgataacgacgccgccatgcaatgacggcgggcccgcgagcgagagcctccggcgagcgacacattatactctcgattacctgcgcgagggatcgaagccggccggccgagacgccgcgcggcttggtcaacgagagcccaccgcggcgatagccgcgcgcgcttatgcaaatggccgccgcagcggcgaataacacgaatatgatcggcttgacctaacagcggctactcatacctggataacgcaggcggccggacttaggcggaagatgtagctactttccctggcttgcagttgagcaattccagcgcgccatgtttgattgcgatcaacagctccgctgtagaacaagcaccaatagagccttctatgagcagccaaccatcgccgttgcctggcattgctcatgatctgctttatgtgacgtcagcgtattcgagttcagtgatgccacgttcttccatcatcccaagcggctcttggcctcgtcgtatgccagctgcaatcgcagcaggatattgcggagaatcttccgtcgaagcatttctcaaacgagtcggcatcgagtatcctcaaccacggatcaaggaaggaaggcgtcagctgtggttgagagacgatctggaccgggccatagccccggatctcgtgccaggcgacctcgccgaggatttgtgattttggagcgccggcttccgcggttcgtcgaagcgcgccggttagctagtggatcgatcggcttctatttccgcatcccgacgcattaccgcaggctcggctgcgagatggcgaatgagccattgggtacgaactacgaggcggcgtgcggcgatgacagcaaaggcggacgcgccgccacgctcaatgcattgttcgatgaatggaacggccagcgcaggggcgaacccatcgagcaaggcaagattgcacgctacggcagcatcgattggctgtttcggcaatacaagaccgagaaggcctacaccgagaaggtgtcaccccgttcgcgtccagactacgagcgtatcatgctactgatctgcgatacggtcggaaagagcgagcgccgaatcggagaacggcagatcagagaggttacaccgcgagctgccgacaaaatatacgagaggatcattcacggcccgaacgggctgaggctgcggcaaggcgagaaggtggtggccctctgccgcaaggtctggcgcatcatgcgacgcctacatccggacttgttcgacaagaagcatcccaacccttgggacgatttcacgctcaagagccgcacgaagagcaagaagcacgcggtcacccgcgaagaagtctacaaatttgcctggggctgcatcaaggaggctcggccggagccggcagccgtcgctgtcatttgctttgagtggctgcagcggcccgagaacgtggtcgccgggtttccgagctggccggattatcgtagcaagaactggccgcacgcggtgaggattgaacaccataagaacaagtcgttggtctggcatcctctcgaagagatcgtcgacggcgaagccatcaagttttacgccgaggtcgaggaaatcctgggctatctgccaaggctcggtgttcccatgatcatgcgcaagatcgaacgaggtgagcgcaaaggcgatgccaaggtgtggtcctatcctggtatggagaaggtcgtgcagcagatgcgcaagaagatcgatggcgtgtcggagctgtttacgcttgatgcctgccggcacggcggcatgaccgaactcgaggaagccgaactgacagacggtcagggccgtgcactctccggacacaaaacggcgcaggcctatcgtggctacgccaaagaaacgatgcggcgggcgctggcagcaacgcgcaaacgtcacgcgcaccttttggcgcagaagcaactcgaacaagcagatgccaacgcgggtgagccgagcatgatgagcggtgacggcgtgacgcgacggaatgcgtcatagcgagcccacgcttattccatcgcagccaaattttgaacgtcgctcacggatcgcgactcgacgcagttgcgcaccgttgccgaaacaaaataggcacggatttccaaatgacggggcaaattcgcttccaaacgccccgaaatggctgctcaagccacgccaattatgccaacaaaatcaatgctttgaatatggctggggcgggagggatcgaacctccgaatggcggaatcaaaatccgctgccttaccgcttggctacgccccaacgcgccgattgaaggccacgccggtctatagggtgagtcccgccatttcaacagggcggtgatcgaaaaggcacgaaagccgcaggacgaggccgctccggtcacgcagcgccgcggtggccgagacagaccgtacgatgtccgttcggacagttgagagcccgccggtttcatgggatgacgatttgcaaacgcctcgtcgggagtaacgccatgacctaccgcgcgccgatcaacgatattctgctgtccctcaatcatggtgcggggctcgctgccgccgtggcggccggccactacggcgatttcgatagcgagatcaccgctgcggtattggaagaagccggcaagttcgccgccgacgtgctggcgccgctgaacacggtcggcgacgaacacggcatcaagctcgacaacggcaaggtgacgaccgcacccggctggcccgacgcctatcagcgctggaccgccgcgggatggaacgcggtgtccgggccggaagcattcggcggccagggcctgccgctcgcgatcaacgccgcctgcaccgagatctggagcgcatcgaatgtcgccttcggcctctgccccttgctgacgttgtccgcaatcgaggcgctcgatgcccacggcagcgacgagctgaagaacatctatctcgagaagctcgtcaccggcgaatggaccggcacgatgcagctcaccgagcccaatgccggctccgacgtcggcgcgctgcgcactcgcgccgaacgcgccgatgacggcacctaccgcatcaagggcaccaagatcttcatcacctacggcgagcacgacatgaccgacaacatcgtgcacttcgtgctcgcacgattgcccgatgcgccctcgggcaccaagggaatttccctcttcctcgtgccgaagttcctggtcaatgccgacggctcgctcggcgcgcgcaacgacatccatgcgagcggcgtcgagcacaagctcggcatgcacgcttcgccgacctgcaccatgaccatgggcgacaagggcggtgcgatcggcttcctgatcggcgaggaaaacgccggcatgcgctgcatgttcacgatgatgaaccaggcccggctcggcgtcggcctcgaaggcgtcggcattgccgaccgcgcctatcagcaggcgctggcctatgcgcgggagcgccgccagggcaaggtcgtcggccacaagggcgacgggatggatccgatcatcgtgcatcccgacgtcaagcgcatgctgatgcagatgcgcagcatgacggcggcggcgcgcacgatctgctacgccaccgcggtcgcgctcgacgtctcggtgcgcgccaaggacgccaaggttcgcgcagatgccgcggcgcgcggcgcgttgctgaccccgatcgccaaggcgttctccaccgatatcggcaacgaggtcgcctatctcggcgtgcaggttcatggcggcatgggcttcatcgaggagaccggcgccgcgcagcattaccgcgatgcccgcatcacctcgatctacgagggcaccaacggcatccagtcgatcgacctcgtcacccgcaagctcggcgccaatggcggcgcttcggtgtgggcgctgctcgacgagctcaatgccaccatcaagcaggtcgagacctccaacgatccggcgttcggcaccacgggcgccaagctgcgcgatgcccacgccgcgctcgagcgcaccagcaaatggctgctcgaacggctggccgccgcgccgaacgatgcgctcgccggcgcgacgccctatctgcggctgttcggcgccacgctcggcggctgcctgctcgccggcgaagcgctcgccgccaaggcggacggcgcagccgagccgcagcgttacgtcgcgctggcgcgcttctttgccgagaacatttcggtgcaggcgccgtcgctggaaaagaccgtgaccgaaagcgccgaggcgatcaccggcgcggaggccgtgctggcggggtgagggctccacgtctcgctcgatcccactccgcgccacattcacaaccatcgtccctgcttccgcctgcgcaagcggggacgacagtgagggtgttgcacgcctggtgagtcatacgctcgcattctcgcgacatgttttgcccgagccttgctgttcgttccgccctctcttgagcagagggcgcagggaaagccgggtgccgatcgcacccatgggccccgagcaaagggtagaaagctcgggggttaggaccacaggtgtcaccggaaacaacccggctttccctgcgcgatgggttacggcttacttcgtgctctccccggcgagactgggcttgcttgtcaccgccttcgcaaaacgccttcgcgtcctgcgacgagacacctgccgttagggcgtcaggaccacacgacttcaccgtccgcctcgttgcacactcgtcagctgcgcaatcggcgtccaccgcatctcgacccacgttcgtgacgaccgcgaagcgcccctcgtgccgggtgagacgagcggaccatacacagagttgtcattacgataaaccgaaatatttttgtcgacgggccttgacccgtcgggcaactcagtgattgagcacgccgcgttcacatcgagaaccggccgccggatacccattcctgcgcttctgatcctatgcgaggcaaaatccgcgtttacgtgcattgcatcggtacacaacttttgggtgccgctggcgcctgacgatggcgatcggtaaacagggagctaacaaactaggctctgtaagcctggtgtaagcattcgtcagcttcgcgtaagggggccggagattttgtggcgctacccgctattccaccaaccgtgcgtaagcattgcttaacggcttgatctccaagactcgcggaagcgctggaatacctcccaacggctgacaacgcgcccggcagatcgccctgttgaatcaactggtgatgcagatgaagttcgtgatgcgctcctggctctctcgcttcggcacagatcgcggggccaacgttgccgtaatctttgcattggcgacggtgccgttggtctacctgttgggtatgaccacggattacacccaggccctgcgcaagaagaatcagttggatgccgcggcggacgctgcggcaattgcagccgtgcggcctgccatgctgctgcaaacggattccacggccaaggccgctgccgccgccgtttttgcgtccacagccaacagcatgaccggcttgagctcggtgccgtcaccgacgatcaacatcgtcgattccgggctccagcgtaccgtgacggtttcgtacaccgcgcagtcgatcaacaacttcggcaccctgcttcgcagcgcgacctgggccgtcggcggcacctcgacggcacgcgcggcaagcgcgcccaacatgaatttctatctggtgctcgacgactcgccttccatggcgattggcgcgacccagaacgacatcaacaatctgatatcttacacgtccagccagccatccgcctcgcgaagctgcggcttcgcctgccatgaaacgcatcccaacctcgacagcggcgccaattcctcgagcgtcgacaacctgaccattgcgcgcaacaacggcgtcaccttgcgcatcgatctcgtggtgaatgccgtcaatcagctgctcgtttcatgggcgaactgcccgcagaccagcgtttcgggcggcgtcatgcaatgcatgtcggccctgaacaacaccacctacaaggccggcctctataccttcgactacggcttcaacaccctgcaaacgccgaccagcccgaccacggcgggacaggccatttcgaacattcagctgatgacggtcgaccaccagaattgcgtgatctcgggaaactgcaccacggactacggcacggacattgagaacgcgctcagcagcgtcaacaacatcatgccgaatcccggcctcggcagcaatcaatcgggcgacacgccgcaggaagtcgtattcctcgtcaccgacggcgtcgacgacaagatcatctcgctgagctcgtcctgcaatgccaacgcggtactacagacagtgggctcgaagttccggtgccagcaaccgatcgacccaacgatctgcacgacgatcaagaaccggggtattcgcattgcaatcctctacaccgagtatctgcagctgagcgacggctggtacatgagtcatatctcccagttcaacaacccgtcctcttcaaccggccagatcgcacaaaacctgcaatcgtgcgcttcgccgggccttttctccgacgttcagaccggtggcgacatctcggcggcattgacggatttgttcatcaaggtcgcctcaagtacagccagcctcacgcagtaagaaagcgcggtggtccaggtgacgatcccagtgacgatccgatcggtgaagagaatccgaaatcgctccggcgccttcatgagggatcgccgcggcgccactgcggtcgagttcgcgctcgtcgcgacgccgtttctcgccctcctcgtcgcgatcgtgcagacgtttctcgtgttctttgcgcaggagatgctcgaaggggtggtgcagcaatcgagccgacagattttgaccggacagacgcaatcacaacaggcgacacagaccgcctttcaccagaccgtctgcaatcaggtcgctgtactgttcacctgcagcaagatcctggtcgacgtgcgggtcgccaccagctggtcgaccgccgatacgtctgctctcatcccgacgtatgacagccagggcaacgtcaacaacatgcaattcaatccgggaaatgccggagacatcgtcgtggtccgggtgatgtacatgtggccggtcttgctcggcccccttggattcaatctttcaaatcagcccaacaacacccggctgattctggccactgccgccttccagaacgagccggcctcgtaggatgtgatccgatgaccaagctgtcccttcgagcgcggaagttctggatcgataccgacgccctggcggcgatcgagtttgccatggtgttgccgttcatgttgctgctctatgtcggcggcatcgaacttgccaacggcatggccatcaacatcaaggtcaccgcggccgcccattccgtcgccgacatggtctcgcagaatacgcaagtcagcgcgagccagctgcagaacatcctcggcgcttcgaccgcgatcctcgcgccgtatccgacgaccagcaacggcaactcgctcaccaccgttactgtttcagaagtctccacggacagcaacggcaaggcgacggtgcagtggagccagtcctacaacggaacgagcttcgtcacggggagaccggtcggtcaaacgatcgcgttgcctgcctcgctcgccgggacgcagaactacaatgtctcgttcattctgggcgaagtgtcctacggctatacgccaaatctcggcttcaccatcagcgggaccgtgacgctgagagacagctattacctgtttccgcgttgttcgaccaacagccccgccaacgcaagctttccgtactatgacgtcaaactgacgtcctcgacgacctgcacctgcatccagcacctgcaacagaagatctgctagatcacgatcggtttccagggaatcgtatcatgatctcatctcttgagctcggacaaccgttttccgtttttccggatcgtgctgcagtcccgcgctcagtccggtgcgttgagaaacagccggacatcggcgagaaagagctcggcgtgctgtgactgcgcgccgtggccggcgtcggggcacatcaccagatacgcgccgcgcaatactcagccagctccgcaacagtcgaaggcgtcacgcccgacgaacggccgatgccgaagcggcgataggccagttgaacgccgctcgcctgggcgaaccgggtcggcgccgtttcatgcgtatcgttcatggacagacctcactttcttgccgcctcgtcgtccgaaaggctgccgacgatcgatgcccgtcgggacaattcgatccagttgccatcgggatcgaggatcatggaaatccgcgcgacctcgccaagcgtcaccggcgcgaggccctcgcggacgcccttgccgcgcagctcgtcatgcacggcgtcgatatcagcgacctgcaacgtgatgtagcgccagccgcgcgcttgcctgattggatcgacggtcgcagcgcgatcttgcgtcagcaggatgaggctgtcgccgaggcggaaggccgcgccgcccgaccaggattgctcggtgaagccgaggatgtcgccgtagaacctgcgatgcgcggcgagatcacgcaccaccatcgcgaccgcgatctggctgatgccgtcgtatcccggcgccaccaggcagaccccgttgccgtcgggatcgtgcatgtgttgcggcacgccgacgccctcttgcgcgatgatcagttcgcgatagccgctcggcgcgaccgccggcagcggctcgacgtgatgattgagcttgatgaccgaaccgtgcgcgtcgtggcggtactgcttctggccgcggcggaccggcagcacatgatcgaaacgaagcccggcatcctgctgccagaaccgcagcatcggctcgagattgttggtggaaaggccgacgtcgatgacgttcttggcgagttgcatgtccggcctccctcagccgcccgcgcgctcgcaagctgctcagtccgggaagcgatcaccaaatatcggcaagccgctgcgtgactgtgcgcgcgtcgcctcatcctggatgacatcccgatgctcggcaaggatgtcgccctgcatgcgcacgatatcggcgacggcccaggccgccggctggccgtggccgctgaacctgccgtgcagaatgatgaaatcgacggtcgccgccgccaaatggttctcgtggcgcaaacgtcgcgggccagtccttgaccaggccgaacagcccgtcgcggccgggcggaatatgcgcgctgtgctggatgtagcgcggccaccggaatcgctcggcggcgacatagtcgcgcttgttgaacggggtatcgaacgcgttcagcacgatcccggggcggtgatcttcggccggcgcgttcatggcgaggcttccttgacgaggggttacttgcggaccagcgggatctgcagattggtcgggcggttctgctcggtgtcgaagccgcggccgtcgacattgcgggcgccccagaacaacaggtcgcccctgagataaaccaggtcgtattccatgaaattggcgccttccttcaatccgaagggcgcgaacgacttgccgaagatgctctgcggcgcgtcgaccgcccacggcgcatagccggtggaggcgaccttgttgagcacgtcggcaaaaccctgcgccagcggcgtgacctcataggcttcgtccgccgtgaaatcgaccttctgcgcgcctggcgcaatcggatgcgcgccctgccactgcatgtgcccgacgatcctgatgcgcgccagcggcaccttgccgtagggatcggcagagttgacgaccacgagttcgaagcgatcggaggactgatagacgaaggcgcgcttgagatagaacggcttgatcgagccgtccgggttcttgctcggccgtatctcgggcgcgatgctctcccagttgccggcaagtgcctgcttgatcgtcgcgacgtcctgttccatggcgccagtccttggttgattgccgggagattgcgcagcagcgccgccgagccccgccagcaccagcagcgacaccagcaacgctccgtaacctgtccgcatgcgcaagctccgtctcggcgacgttcgggccctctgcccgcaaggcagagcccacaacgcgaattgcgcttcgctatagacagcgctggccggcttgaaaaagactttgtaagctggccccatgcctgcgagacatgacacgagatttggcagcgggatcttccaggcagcgatcgggagactgtgatggagctccggcatctgcgctacttcgttgccgtggccgatgcgggcagcctgaccgttgccgccgagcagaagctccacacctcgcagccctccctgagccggcagattcgcgatctcgaggaggaagtcggcgttcaactgctgaaccgcggcgcgcagggcatcgagctgaccgcggctggcaaggcgtttctcgaccatgcccggatggcgctgctgcaggccgaggccgccaaggaagcggcgctgcgcgcggcgcagccgccgaagcccgtgttctcgctcggattcctgtcgggcgccgaaatcgatctgctgcccgaggtgacccgcgtgttgcgcgaggaatttcccggcatcgatatccgtctgtcgagcgactattcgccgacgcttgccaaggccctgatgcggcgcaagctcgatgccgccttcatgcgggccgacgacaacatggaagaccttgcttgcaaacgcgtgcgcaccgatccgctggtgttcgtgtttccgcgcgaccatcggctggcggcgcaggccaacgtcgcgccggaagacatcgtcaacgagaccttctttctgccgtccagatccgcgccggcggtgcgccgtgttgtgctggagtatttcaaccgcgccggaatagacatcaggccggagcacgaggtgcataatgtagtgcacgcgatatcgatgatcacctcgacgcatgcggtgatgctgctgcctgcctacacggcgcgctatctgcccgacaccatcaccacgcgtccggtgcagggagaggcgccgacgctcgatctcgtgatcgcctatcacaaggccaacaaatccccgatcctgaagctgttgctgtcgcgggtcggccggctggccggcgcggcggcctgacacaattaattcagtgaggagcgatatgccggcgagcctcgttcagacgtttcgagcctttgcctacaacaatgcctgggccaatcaccgcatgctgaccgcctgcgccggtctcagccaggcggagttcgcggcggcccggaccgggttcttcccgagcctgcaggcgacgctgaaccacatccatgtcatcgatctcttttatgtcgacgccctcgaaggtggctggctcgggccggaggcgtgggccaatgaagtgccctacccggcggtcgacgcgctgaaaaccgcgcaacgcgcgatcgaccagcgcctgatcgctcactgcgacgcgctgacgcctgcacggctcgatgatgtggtgagggtcaatcgcgacacgtcggtacagaccgagcgccgcgaccgcctgttgatgcatctgttccagcaccagatccatcatcgcggccaggctcacgcgatgctcgccgaaaccaccgtcaagccgccgcagctcgacgaatttttcgccgccggcgaagctccgctccgcgaagccgagttcagggagctcggctggagcgaggccgccgtgtggggcggctgaaaggcatgttgcgcgcgcctgcttcgatgcgctcggccaggtcgacggcgcaagggacgcagtgctctcctcgcgcgtgccggtgctgctgtggaacgggcaggacgacggaccgcatgcgccgatgcagcgcttcgcggcggagaacggcctgtatgcgatgtcggtccccggcgatcatctcggcgcgctcctgcagcacggcgccgcgatcggccgcggcatcggctcgttcgtcgggcgcggctagcacgtcaagtggcacgcgacggctcggctcgctcgacgcacgccgccgacatcgcgggattcaggttgactgcactgcgccgttctcatgcccgcctgcggcgaaaagcggcctggaacatttggggcatggacgggatcatgtaggatagcagcacgatctccgccggcgacgcagccggccgcccctggaactgcttgatgaccgcgcatgtcatagtaaccgacgaagccgccacgcgcgtgatccggctacgccggcccgagaagaagaacgcgatcaccgaggagatgtttcgcgcgatcagcgaggcgatcgacagggcgcagaacgatccgaggatccgctgcctgatcatcaccggcggctccggcgtgttcaccgcgggcaacgacatcgaggacctgctcacgcagggcacctcgaccggcgagacgccgcccgcctcggacctcgtcaagttcctgtattcgctggcccacaacgtcaagccgatcatcgccgccgtcgacggcgtcgcgatggggatcggcaccaccatgctgtttcactgcgactatgtgctggccagcacgaccgcgctgttctcgacgccgttctccaatttcggcctggtgccggaaggtgcctccagcctgttgatgccgcgcacgatgggtcaccagcgcgctttcgcgatgctggtgatgggccgcaccatgtcggccgacgatgcgcgcgtcgccggcttcgtcaacgccgtggtggcgcctggacatgccgaggtcgaggcgcacaagattgcgcgcgagatctgcgcgctgccggccgaggcggtggcgatctcgcggcgcctgatccggctgccgcccgaggacgtcgcccgccgcatcgagcaggagaaccatctgttcagcgagcggatgcgctccaaggaggcggtcagcgccttcacggcattcctggcgcgccccaaagattgagcgaagcgtcgggattgaaacgaagcgtcgcaaaattgtagtggcgtcgcgccatgatcgtgtgttccatggacaggtcatgagacagccccgcctgacactagtcgccgcgctctgcgcgctcggcctcgccgcaaccggcccttgcctggcacagagtgccgcagcgccggtggacctgcgcattctcgcgatcaacgactttcacggctacctgcgaccgccgcccggcggcatccgcatcaccgatcccgctgatgcgaccaggaagatcatggtgcccgccggcggatcggagcgggtcgccaccgtggtcaagcagctgcgcgagggacacaagaacaacatcttcgtcgcggccggcgacctgatcggcgccagcccgttcctgtcggcgatgttccatgacgagccgaccatcgagtcgctttcgatgatggggcttgcgatctcctcggtcggcaatcacgaattcgacgagggcaaggatgagctgctgcggatgcagaatggcggctgccacccgatcgacaaatgccaggggccgcatcccttcctgggggccaaattccgctacctcgccgcctccacgatcgacaaggcgaccggcaagccggtgtttccgccctacgagatcaaggagttcgacggcattgcggtcgccttcatcggcctgacgctgaagaacacgccgaacctggtgtcgccggccggcgtcgccagcctcgacttccgcgacgaggccgagaccgtcaatgcgctggtccccgagctgaaggcgaagggcgtcgaggcgatcgtggtcttgatccacgaaggcggttttccgaccggcgactacaatgaatgccccgggatctccgggccgatcgtcgacatcgtcaagaagttcgatcgcgcggtcgacgtcgtaatctccggccacacccaccaggcctatatctgcgagatcgacggacggctcgtcacgtcgggcgacaaatacggcacgctggtcaccgcgatcgatctccagctcgatccgaagacccatgacgttatcagcgccaaggccgacaacaccatcgtgaagatcggcggcaccgccaaggatcccgagcagagcgcgctcctggaatcctatgaccggctggccgcgccgatcgccaaccgcgcggcgggttcggtcaccgagacgctgtcgcgcacgcccggcgagaccggcgaaagcgtgctcggcgatatcgtcgccgacgcgcagctcagcgccaccagctcggagccgaacggcggcgcggtgatcgccctcaccaatccgggcggcgtgcgcaccgacatcgtcaagcgcgaggacggcgcggtcacctatgccgatatcttcgcaagccagccgttccgcaaccagctcgtgacgatgacgctgaccggcaagcagctcaaggacgtgctggagcagcaatgggccgacccgaagcggccgcgcgccctgcaggtctcgaagggctttgcctatgcgtgggatgcgggcaagggtgacggcgagcgcatcatcgccgcgcggatgtcgctcgacgggaagccgatcgacccggccgcgagctaccgcgtcaccgtgaacaattatctcgccgaaggcggcgacggcttcacggtgttcaaggaagggacagcgcagcagttcggcatctacgacgtcgatgcgctctatgcctacttcaaggccaacagcccggtcggcccgactgccggcaagcggatcgagcgggtcaactgagacaccgcatatgactgtctcctcgtcgttgcggagcacgaagcgacgaagcaatccatttttcagcttgcgcggaaagatggattgcttcgcggagcctgtcatcgggcgcgcattcgcgcgacccgttggttcgcaatgaccgggatagcgccgggctgttgcccccggccgccgtcccgaaaaggtgagggccgggtcagagcgggccctttccgctgggccggtaaccgcctacattagggcgtcctcgcacgcgcctccattgcgccgggaaattgcatgacactgcttctgacgcaccccgcctgcctcgatcacctgaccccacccggacatcccgaacgccccgaccggctgcgcgcggtcgccgaggtgcttggcgaagaccgtttcaaggcgctggtgcgcgacctcgcgccggaaggcgacctcgacaccgtgttgctctgccatggcgagcactatgtcggcgaactgcgccacatcgcgccgacttcgggcatgatctatatcgacggcgacacctcgatgtcgccgggcacctgggaagccgtgatgcgcggcgtcggcggcgccgtggccgccaccgatcaggtgatggagggcaagcaccagaacgccttcgtcgcagtgcgcccgcccgggcaccacgccgagaaatcgacgccgatgggcttctgcttcttcgacaatgccgcgatcgccgcgcgccacgcgcaacgcaaatacggcatcaagcgcgccgcgatcatcgatttcgacgtccatcacggcaacggcacgcaggacatcttctgggccgatccgaccgtgatgtactgctcgacgcaccagatgccgctgttccccggcactggcgctgccggcgaacgcggcgagcacgacaccgtcgtcaacgcgccgctggcgcccggcgacggcggcgccaaattccgctccgcgttcgagaacctgatcctgccgcagctcgagaagttttccccggaactcgtcgtcatctcggcaggcttcgatgcccatcaccgcgacccgctggcgtcgatcaacctgacgggtgaggatttcggctgggtcacgcgcaagctgatggatctcgccgacaagagcgccggcgggcgcgtcgtctccgtcctggaaggcggctacgacctcgagggcctgaaagagtcggtagcatctcacgtcaccgcattgatgggcggataaatacccgccacaatacgcccgcaaaaattcgattgattctgcgccggggtaagcatggcccgcgacgggtcatgcttggacgacaagatccgatcacggtctgatcggcgcactgggaacagataatggccgaaaatactcaagccgacgtcaagaagctctcctttgaacgcgcgatcgaggaactcgaatcgatcgtcaagcggctcgaggacggcaaggtaccgcttgaggaatcggtcgcgatctatgagcgcggcgaggcgctgaagcggcgctgcgaggaattgctgcgccaggccgaagcccgtgtcgacaagatcaccaccgacgcctccggccaggcgtccggcaccgagccgctcgacgtgcagtagcgccgccgccgcatgcgacaggatgtccgccagggcgggcaattattgctgcgtatttccgtcggatcgatcgcgccatggagcgaccgtggcgaccggtgcggccgcgaatcggaccgttccggaccggccagctgccgctaaaatagccaaattggaacccgccccaggccccaaccattgaaaagtctaggtttttcaaggcagcgcataggaaccctgcgtgccctatcgggttggctttggctacggctttggtgtaatgcttccagttctatgggcatttgagggtggcgggcggcccgaaatattcgggcggcatgcgtctcaaatggttcgacaaaactgaaccgggacgggtgaagagcgaccaaggtgatgcgtatcacgtggtccaatccggagtgaatctaggcttacaaccaggcacggtctgccggggcggcacccagtgtctggcattcgctgcgcgatgtgcgcgccaacccatctcgcgtcgggcggttcgttccgacaggcaaaaattggaaattcgcagtgaccacatttagtaaaacgccgcttcttgatactattcacacgcccgatgacctgcgcaagctgaaggtcgagcaggtgcggcaggttgccgacgagctccgccaggaaaccatcgacgccgtgtcggtgaccggcggccatttcggcgccggcctcggcgtggtcgaactgaccaccgccatccactacatcttcgacaccccgcgcgaccgcctgatctgggacgtcggccaccaggcctatccgcacaagatcctgaccggtcgccgcgaccgcatccgcaccctgcgtaccggcggcggcctctccggcttcaccaagcgcaccgagagcgactacgatccgttcggcgccgcgcactcctcgacctcgatttcggccggcctcggcatggccgtggcgcgtgatctctccggcggcaagaacaacgttatcgccgtgatcggtgacggcgcgatgtcggcgggcatggcctatgaggccatgaacaatgccggcgcgatgaactcgcgcctgatcgtgatcctcaacgacaacgacatgtcgatcgcgccgccggtcggcgcgatgagcgcctatctgtcgcgcctgtactccggcaagacctaccgctcgctgcgcgaggccgccaagcagatcaacaagcggctgccgaagatcctcgccaaccgcgccaaccgcgtcgaggaatattcccgcggcttcatgatggacggcggcacgctgttcgaggagttgggcttctactatgtcggcccgatcgacggtcacaatctcgaccatctgctgccggtgctgaagaacgttcgcgacatggagaccggaccgatcctggtccacgtcgtgacccagaagggcaagggctacggcccggcggaagcttccgccgacaagtaccacgccgtcgtcaagttcgacgtcgcgaccggcacccaggccaaggccaagccgaacgcgccggcctaccagaacgtgttcggccagagcctcgtcaaggaagcgcagaaggacgacaagatcgtcgccatcaccgcggcgatgccgtcgggcaccggcgtcgacatcttcaacaaggcattcccggatcgcaccttcgacgtcggcatcgccgagcagcacgcggtgacgttcgctgcgggcctcgccaccgaaggctacaagccgttctgcgcgatctattcgaccttcctgcagcgcggctatgaccaggtggtccatgacgtcgcgatccagagcctgccggtccgcttcgcgatcgaccgtgccggcctggtcggcgccgacggcgcgacccatgccggatcgttcgacaacgcctatctcggctgtctgccgaacttcgtgatcatggcggcctccgacgaggccgagatggtgcacatggtcgcgacccaggttgcgatcaacgatcgcccgagcgcgctgcgctatccgcgcggcgagggccgcggcgtcgagatgccggaagtcggcgttgccctgccgatcggcaagggccgcatcatccgcgagggcaagaaggtcgccctgctctccttcggcacccgcctcgccgagtgtgagaaggcggccgacgagctcgccgcccacggcctctccgccaccatcgccgacgcgcgcttcatgaagccgctcgacgaggagatgatcatgaagctcgcccgcgaccacgagatcctgatcacgatcgaggaaggctcgatcggcggcttcggctcgcatgtcatgcagttcctgtccgacaacgcgatgctggacagcggcatgctcaagttccgctcgatgatcctgcccgacgtgttcctcgatcacgacacgccggcggcgatgtatgcccgcgccggtctcgacgccaagagcatcgttgccaaggtgttcgaaaccctcggcaaggactacaagaccgagaccgtcaagctcgcgtaatcgccttccacctctctcccaccggggagaggtttcaagtcgatcttgtcctgagcaagtccatgaaaatctatctggcaggtcctgacgtgttcctgccggatgccgtggagatcggccgccgcaaggcggaggtttgcgcctatcacgggctcaccgggctctatccgctcgacaacagcatcgatcccaccgccgccggcgcctcgctcaccatcttcaagagcaacgaggcgatgatggagtctgccgacgccattatcgccaatttgacgccgtttcgcggccccagtgccgacgcaggcaccgtctatgaactcggctacatggcggggcgcggcaaactgtgcctcgcctattcgaacgatcccacgtcctacgccaatcgcgtggcacggctcggccaggtcgtgccggcatccgacggacgcctgatcgacgcggaggggctgacggtggaagagtttggattgccggacaatctgatgatgatgcacgcgctcgatttacacggcagcccgctggtgacgccgcgggagccgtcggccgatctctggcacgacctcacctccttcgaggcctgcgtgcggctcgccgccgcgcaacgccggcagagcgccaagtgagcaagcaagtgagcaaggcaggcggcaacgacgcatccgccggcaagcgcatcgacgtgctgctggtcgaacgcggcctgttcgaaagccgcgcacgggcacgcgccgcgatcgacgccggcctcgtcaccgccgacggcaagcaaatcgccaaagcgtccgagatcgtcgcgcccggcgctgcactcacggccgagccggcgcatccctatgtctcgcgcggcggcgtcaagctcgccggcgcgctcgagcactatccgatcgatgtcgagggccatgtctgcctcgatgtcggcgcttcgaccggcggcttcaccgaagtgctgctcgccaatggtgcgagcctcgtgttcgccatcgacgtcggccacggccagctgcatccttcgctgcatggcgatccgaagatcgtctccatggaagagaccgacatcaggaactacgagggcaagcggctgccggcgcggcccgacatcgtcgtgatcgatgtcagcttcatctcgctcaagctggtgctgccggtggcgctgtcgctggcggcggccccgatgcatctgctggcgctgatcaagccgcagttcgaggcggcccgcaagcactccaagcgcggcgtcatccgcaacgcgatggtgcaccaggagatctgcgacgatatcgcggcctttgccgcctcgctcggctgcaccgacatccaggtgttcccgtcatcgataccgggcggcgacggcaacatcgaattcttcctcggcgcgcgccgtggctgaaatcctcaccatcgaccatgtcggccaccgcggcgacggcgtcgcgatcgacggatcgcagtcgatcttcgtgccttatgcgctggccggtgaaaccgtcgaggtcgaggacgtccccggcaatcatcccgaccggcggcggctgctgcgggtcacgcagcaaagccccgagcgcatcgcgccgttctgtccgcatttcggcgtctgcggcggctgcgcgatccagcactggaacgaggagccctaccaggcgtggaagcgcaacatcgtggtcgagacgctggcgcaggccaggatcgcggccgaggttgcgccactgctcgacgcccatggcgcgggccgtcgccgcatcacgttgcacggacgcatgggcacccatgaggtcctcaaggtcggcttcgccgcggcggggtcgcacgacatcatcccggtcgaccgctgtccgatactcgatcctacgctcgacggcgcgctcgaggcggcatggaccgtcgccgagccgctgattgcgatcggcaagccgctcgacatccaggtgaccgcgaccctcaacggtctcgacatcgacgtgcgcggctccggcgcgctgccgaccaacctgatcaccactctgtcgcgcgtcgcagaaaagcaccggctggcgcggctgacgcggcacggcgagttggtgctgcaacgcggctctcccgacgtggcgatcggaacagccaaggtcgtgctgccgccgggctcgttcctgcaggccaccctcaagggcgaagagacgcttgcggcgctggtccgcgcgcattgcggccgcgccaagcatatcgccgacctgttctgcggtgttggcccgttcgcactgcgcctcgcggagaaggcgcgggtcgcggccttcgacagcgacgccggcgcgatcgcggcattgcagaaggccgcacagtcgacgccggggctgaagccgctgaaagccgaggcgcgcgacctgttccgccgcccgctgatgccgcaggagttgcgcgactatgacgccgtcgtgttcgatccaccgcggcagggcgcgcaggcccaggtcacgcagttggcggcaagcaaggtgccggtggtcgttgcggtgtcctgcaatgccgcaacattcgcgcgcgacgcgaaaaccctgatcgacggcggctacaagatcgctgatgtcaccccggtcgaccagttccgtcataccccgcatgtcgagctggtggcgcgcttcgcacgctgaaccatcgttgcgcctatcgcagcgtgcggcggtctcgccataatctgcatcgcatgtcccacgaagaaatgatgggtttcgctgcgctctatccagcccacatgatctacaagatcatcgtccccagcgatcctgccagatcttctcgccgatcgtgcagctgacccgcggctccttctcggcggtccgcaccaccgggcgttcgggagtgcggccggcgacttcgagcagcagcttggtgcggatcgcctccttgaatttctcgcgatccttgatcgtcaccacgaaggagccgggcccgccgatcacgcagtcttcgtagtaccagtcgagattttcgatatccatcgtcgagtaggacggctccttcaccatgatcggcaggccgttgatgacgatgcccttgtcgagcgcagcatcgcgggcaggcgtgatcggcgcgccgttgttgttggggccgtcgccggaaatatcgatcacgcggcgcaggccgcgatgcggattgtcatcgaacatcgggatcgcgaaatagatcgcgcccgagatcgaagtgcgcgaggcacggcgcaccggcgtcttcatgatctcggcggagaccgcgtcggccgattcagggccgtcgatcacccgccagggaatgatgaccttctggtcgttggaggcggcccactcgaaataggtcaccgagatcttgccgttcggaccggccttcagcgcctgcagaaattccttggagacgatcgcctgcgcgtagccctcacgctggatcgcgagctcgtccatgtccatcgaataggagacgtcgaccgcgatgatcagctcgatatcgacgcttggcgtggattccttttcggccagccggccggtctgtgtacccgggcccggcgcggcaacaccggccacatcgccgctggccaacatgcccgcgacaagcacagctccgatcgagacataccagcgcattgcggccctcccgtcgtgtgatgtcatggtgacacgcaaatcaggcggcgaaaagcgcagatatcatctatccttcacattcaagttaggcacctgcaggctggacgtcacgcatgagacgacacgcgccgtgccgttgccgcaatgacgccgtgcaaatcgaacggttccaagatgtgccggaagacggtattcttacgggcaatcgcgagggagtgcgatgcccgataccgtcgtcaagccgaaaaccaggacaaagaccaaggtcgagcggccgcgcctgcacaaggtgatcctggtcaatgacgactacacgccgcgcgaattcgtcgtcaccgttctgaagggcgaattccgcatgaccgacgaccaggcctacaaggtgatgttgaccgcgcaccagcgcggcgtctgcgtggtcgctgtgttcaccagggatgtcgccgagaccaaggcgacgcgcgccaccgacgccggccgcgccaagggctacccgctgctgttcaccaccgagccggaagagtagccagccctcaccgctccgcgggctgagcgagttgcgcccgctggctgagcgcgatgtcggcgacgacggcgcccatcaccagcgcgccgccgatcatggcgcggagcgacggcacttcggcaaatgccagccacacccagaacggcatcagcggcgtttcgagggttgcaatcagcgatgcctgcgcggacggcagcaatctcgagccgaccgtaaacaaagtcaggccgagtccgacctggcatgcgccgaacagcgcgagcacaccgagatcggcaccgccgaccgcaccgatgtcctgcccgaacggaacgctgatcgcgctgccgaggaagttggagagtgccgcagccgcgatcatcggcgtgcccctgtgccgccggatcaccaccgtcatcagcgagatcgccagcaccatcacgcaggcaagcccgatgcccctgtaatccgtgatgcccccggcgccgctgacggtgatggcgacgcccgcgagcgcgaccaggcttgccagcaaggtgcccggccgcgcctgctcgcgcagccagagccaggcgatcgcagcggccgcaaacggctgcatcgcgatcaggattgcgacattggcgacgctggtcagttgcagcgccggaatgaacgtcaccatgccaagggtcgagagaccggccaccagccatccgctcaacggcatcgcgacgagatcgcgcgcgccgcgccggccctgcgtcgcgaccaggaacagcacgatcgcgccgccaccgaacagcccgcgccagaacaggatggtccaggaatcgaagtgcagcagccgggtgaagaacggcgcggtgctccacgccgccgcggccgccacgaccagcgcaatcccggtgcgacgctgcgcgtcggtgtcagtcacatcgcaccgatgctaactcgcagcggcgaccggcgcctcgtcgaacaggccatagacccgttccgccttcgagaaccccgcgatcggaaactcgccgaggtcgctccagccgccgtcatggatgccggcgaagcgctcggaggccacgacggtgcggccgagacggccggcgatcttctccagccgcgccgcgaggttgaccgccggaccgatgcaggtgaagtcgagccggttgccgccgccgatattgccgtacagcacgcgcccgagatgcagcgcgacgccgaagcggaagcgctcgaccgcgtcgccgttgggaaattgcagcgcctcgaccccggcgcgggacgcccgcgcggcatccaacacccgcgagcagacctgcgcctcgtcgccgagatattcgtcgaccggaaacaccgcgagcaagccgtcgcccatgaatttgagcacctcgccgccatggtcgcggatcgcggtgacctggcaatcgaagtagaggttgagaatttccacgacggtctcggccggcaagcggtccgacagcgcggtgaagccgcgcaggtcggacagccagatcgccgcatccatcgtatcggcatggccgcgtcggatctggccgcccatgatgcgctcgccggcacggttgccgacataggtgtcgagcagcagcgaggcggtgcggcgcagcgtcacgatttcgatgtaacgcgccagcggaatggcgatcgatcggatcgcgtcgagttgttcctcggtgaagccgcccggctgcctggtggtccagctcgatgcgttggggcggccgtcggtgttgatcagcggcaccgcaatgtagtcggtgacgccctcggcctgcaggtccacgacgatcggaaagcgcttgctcgagggatcatcgagccgcgcgcgcacctcaattccctgcttaaaaacgatcgacagcgggctaacggcgaattccggggactcctcgatgttgtgatcgacggtcccggtctcgacctcagcacccggcctccaaaagaaatgccggccatagatctccggatgcagcgtgcgcacgaacacgccgatgcgccatagcggcagcccggcccgcaccagccgttcgcagcactccgccatcatctgcggcggggtcggcgccgatcgcgcgccgccgatcatccacgcgatgacatcccgaagctccgacgcgttcatggcagtccccaaggcggtctggtaccgcccactatataggggatcagcgcccggtctgcccgcggtcgcgcagaaaatgatccgccagcacgcaggccatcatggcctcgcccaccggcacggcgcggatgccgacgcaggggtcgtggcggcccttggtcaggatgtcggtatcggcgcccttgcggtcgacggtgcggcgcgtggtcaggatcgaggacgtcggcttgaccgcaaagcgcaccaccaccggctggccggtcgagatgccgcccagcacgccgccggcatggttggacaggaaacgcgtgccgttgttgccggtccgcatctcgtcggcgttctcctcgccggtcagctcggcggcgccgaagccggcaccgatctcgacgcccttcaccgcgttgatgctcatcatcgccgatgccagatcgctgtcgagcttggcatagatcggcgcgccgagaccggccggcacgccctctgcgaccacctcgatgacggcgccgatcgaggagccgctcttccggatgccgtcgagatagctttcgaagaacgctgccttgtccttgtcgggacagaagaacggattccttgcgatctcgtcccagtcccacttcgcgcgatcaatcttgtgcggacccatctgcaccagcgcgccgcgcactttcacctcgggcagcaccttgcgcgcgatcgcaccggccgcgacacgggtcgcggtctcgcgcgccgacgatcggccgccgccgcgataatcacgcaggccgtatttcgcctcataggtgaagtcggcatggccggggcggaacttgtccttgatctcggaatagtccttcgagcgctggtcggtgttctcgatcagcagcgcgatcggcgtgccggtcgtcacctgaacgccgctttccggatgcgccatcacaccggacaggatcttcaccgcatccggctcctggcgctgggtggtgaagcgcgactggccggggcggcggcggtcgagatcgtgctggatctcctccaccgtcagagggatcatcggcgggcagccatccaccacgcagccgatcgcgaccccatggctctcgccgaaggtcgtgacgcggaacatatggccgaaagtattgaaggacatggcgtgtcgtaacgcgcggggtcggcagcgtcaaacgggtttcatggccctgaagacgtggctgaccgggcgcgtttaactatgtttctgcagccccgcggggccgaacacgtagaccgcgccctgctcgatcgtgaggtcggcggccgaggccgccgtctcgaagccgagcgcgaccatcagcgcccgcgccgtgccgccatgggcgacggcgaccgtgtccgacgtcaccgaaccgtaccagtcggtcatccgtgcctgcacgtcgacatagctctcgccgccctccggcgcgacctgccacttctcggtcaggcggcgcgcatagaccacggggtcggcggcctgcgcctgcgccagcgtcgagccctcccagctcccgtaggcgatctcgcgcagccgcgcgtcgagggcgtaatcgcccggcggcaggccaagctcggtgcgcaccagctccatggtcgcgcgcgcccggatcagcgggcttgcgacgaacggcagcgtcgtcttgtcacggccgtcgcgcgccaataagtcggcaaggatgcggccggcatgcgccgcctgggcacggccgcgatcgttgagggcgatgtcctgcacgccctgaagccggccctcggcgttccacgacgtctcgccgtggcggatatagtagatcgttggcaccggcattcccgtgacggctggtccttgctgagcgagctgtcgggcgcccggcttccacgcttcgaattttcggctcggaggtacaccagcactttggctggcgacaagcccaaatcggccgcagctgaggcgcactacgcgcaggttggcgcaaccggaataggcacgccgcaagggtgttatgtttgacacggcggccgtcgccgcgaccatcgaagactggatgcatgaccgcgtttcgtcaaagtgtcgaagccatgattccagcgctccgccgctatgcgcgggcgctgacgcgtgacacggatatcgccgatgacctggtgcaggacacgctggtccgcgcgctgcgctcggagcggctgtttctcggcggcgacgtcaggagctggctctacacgatcctgaccaacctgaacaagaaccgcaggcgctcgctggcgcggcgaccgcccctgatgccgctgctcgacaacaatgccgacgccagcggcaccgaggcggagggacgcgacatcgagcgcgcactgtcgacgctggtcgaggagcaacgctcggtgctgctgctcgtgatgctggagggcatgagctaccgcgaggtcgccgatatccagggcgttccgatcggcaccgtgatgtcccgcctcgcccgcgcgcgcgcccatgtgcgggcctcgatcgagggccagcgcccggcgctccggcgggtgaaatgataatgtgcgcaatggcaggtgttcgcttgaacgattttcgaacaagatttggcagagacgactgatatgaccgatccgaacatccccgtcaccgaagacgagctgcacgcttacgtcgacaacgagctgccggccgagcgccgcggcgatgtcgaggcgtggctcgctacccatcccgacgacgcggcacgggtgcagtcatggcgcgcgatggccgagacgctgcatgcgcgctacgatcgcgtgctggacgaggcggtgccgaagcggctcgagctcgaacggctggtgcgccagccgcgccgctgggtctatggcgcggtggcggcaacgcttgccgccttcatcgccggcggcggcgtcggctgggtcgcgcgcggcgcctccgcgacaccgtcgaccttccagagcttcaccctcgatgcgctcgatgcgcaccgcctctacgtggtcgaggtccgccatccggtcgaggtgcccggcagcgagcgcgaccatctgcagcaatggctgaccaagcgctgcggctgggacgtccgcgcgccggagctgaccgggctgaagttggtcggcggccggctgctgccggggcctagcggaccggcgtcgttcctgatgtatgagagcacgtccggcgagcgcttcacggtctacaccgccaaggtgaagaccgaggcgacccagatgcgctatgcggtgcacggcagcgacggcgcattgttctgggccgatcgcggcgtcgcctatgtcgtcagcggcggcacggatcggacgcgcctgacccaggtcgcgcgggcggtctacgatcagatggaaaagagcggcggctgatctcccgtaattttacgggagatcgtgtcgcaagagttgtgccgtttcgagcaagtgaatccagcctcactcggcgtcccaattccgacattgaaaacttcgattcgcgtcatcgacgcgtctcattatcgcaccggatgctcacgcgaagatgatctgcgcccgatccgccgatcggcgcacgcggcctcgattggggttttgtgtaccgcgctggtccccctctcgaggccgcactcgttttccgccatccggtctgcacgccgcagcccaggtattcggacggccggtcatcctttgacgcgctcacgggccggcgtctaccccgatagagtccggggtagatgcagtttcgcgtcttcgcgtctctggggcgcgctcccggcagtcagccgagatcgctgcgcggattataggggttatgctcccgccacgtctgcatcaatgcctcaagctcggcatcgttcccgtcgggaaggatgatgcgggtcgtgacgtagaggtcgccgacagcccccgccttcggcagccccttgcccttgaggcggaaggtgcggccgctggaggtgttcttcgggatcgacagctcgaccgcgctgccgagcgtcggcacgcggaccttgccgcccagcaccgcctcgtagagggtcaccggcagatcgatccgcagatcgttgccgtcgaccttgaagaacggatgcggtgcgatcgagatcgtgatcagcagatcgccgggcgggtggccttgcgcggtgtcgccctgccccttcagccggatctgctggccggcggtgacgccgggcggaatcttgacgttgagctcgcggccggtcggcaggcggacgcgcttgtcgccgcccctgaccgattcctccagcgacaccgtcatggcgacggacagatcgaggtcgacgccgaccccgccgccgtcgaattcaaacgggctggctcgcccggcgcggccgccagcgccgccagcgccgccacgcgcggcgttgccgaacatgctgttgaggatgtcctcgaagctgccgccgcccatgccgccgccggggccaccacgaaaactgtactcgaagccgccgcccggaccggcacggccgccggcgccaccgccagggaacccctggaagcgaggcttgccctcggcatcgatctcgccgcggtcgaactgcttgcgcttgtcctcgtcgccgacgatctcgttggccgtgttgatctccgcaaagcgggccgcggccttcgggtcgttcttgttgttatccgggtgatgtttcttggcgagcttgcgataggcgctcttgatcgtcgcagcgctggcgctccgctgcacccccaagacctcataggggtcgcgcatccgtcacgtctccttcacgggaaaagtccgtcctgaccgggaacccatcggggcccactttgcctctatctgggggctcagtggcatttttgcaactagggaggtgccggcttctgccggaactctcaggactttctccaaggcttcaaactatggatttcccaccgtccctgtcccgccttgcaggcggccccctgcagccagctctcggtggctccattgacatagctggcgaggaaatcccggcacgtcttgccgtcctcgccggaataggcctgggccagcggcgtcaccgagccgcgcgcaccggtttcgggattttcccagggctggctggaatccttgtcgcccttggtcagcacgtcggaggccgcgttgcgggcgaaggcgagatcgctgtcggtcggcatgacagcactcaccggcgtcgggctgatcgagcccgtcacgtccttgtcgtcgatcttggcgaaggcatcgctgcgcgacaggctacagccgccggcgccgacgccgatcaggatcaatgtcaccaccgcgcccgcggggtggatcgccgataggccaacgcgctcccatgccctatatagggccagcagcgcgttctcggacgcgggcggatgcaaatcgggactcctgacatgaccgacacgacctccatcaaacacccgacaccgttaacatcgggtgatttcaccgcggcggaggagccgttcgccctgttcgcagaatggtttgcggaagcggtcaagtccgagcccaacgatccgaacgcgatggcgctcgcaacggtcgatgccgatggcttgcccgacgtgcgcatggtgctgatgaagggcttcgatgccgacggcttcgtgttctacagccacattgcgagcgccaagggccgcgaattggccgcaaatcctaaggccgctttactgtttcactggaaatcgctgcgccgccaggtgcggatccgcgggccggtgacgcctgtgaccgacgccgaggccgacgcctatttcgccacgcggccgaagcaggcgcagatcggcgcctgggccagcaagcagtcgcagccgctggagagccgcttcgccttcgagcaggcgatcgccaagaccggcgcgaaatacgtcatcggcgaggtgccgcggccgcctggctggagcggctggcggatcacgccgcagcgcttcgagttctggcacgaccggccgttccgcctgcacgaccgcatcgaattccgtcgcgatggcgcgggtcacgcgtggtcgaaggtccggctctatccctgaaacactgcgactgtcatggaagggcgaaagcgcgaagcacgtcttcgtgtaagatgcgccctgccatcgacgtcctgatctcttaccgttcgaagacgtcgatgcccggcacggcgccgcgcatggcgaaaacgaaagaaaccgtcgatgacccgcccatccaatgcaccgcggcgcacgctgctcctgaccggcgcgagccgcggcatcggccatgccaccgcgatccggttttcatccgccggctggcgcgtcatcaccctctcgcggcatgcgtttccggaggtttgcccgtggggcgccgggccggaagatcacatcgaggtcgatctcggcagccatgacgacaccgtgcgcgcgatctcggagatccggcagcggctggacaatgacgagctgcatgcgctggtcaacaacgccgcgatctcgccgaaggcggtgggcggcggccggctcggcaccatggacaccgacatcgagacctggacccacgttttccacgtcaacttcttcgcgccggtcatgatcgcgcgcgggctgatcgaggaattgaagcacgccaggggcgcggtggtgaacgtcacctcgatcgccggctcgcgcgtgcatccgtttgccggcgcggcctacgcaacgtcgaaggcggcgcttgcggcactgacgcgcgagatggcatcggacttcggccgcgtcggcgttcgtgtcaacgcgatcgcccccggtgagatcgacacttcgatcctgtcgccgggcaccgagaagatcgtcgaccagcaaatcccgatgcatcgcctcggcacccccgacgaggtcgccaagatcatctacgtgctgtgcacggaaacgagctcctacgtgaacggcgccgagatccacatcaatggtggccagcacgtctgagcttcggcttggatgtgatttcgggggagagaggttcgaggcgatcccggccgccgccgcggccgtagtttgagggattgcttcgatggcaggcgtaacgacgcagacgaggcttctgcctccagaaggcctcagcctctagtccgcatagaaccgacgcgacttcttctcagtccgctgcagcgcgacgtcattcagcgcgctggagcagtcgtcttcgtcctcgccatcaagcagcgcagcgtcacagtaacggcaaagtctcggcgagatcgcctgcaccctgcctgcggcgcggtcctgttgatagcgcgcaaagtcgatgacgttacgccgtggcgttatgatcttctcaaccattgctgtcctccggcttcgaggcgggcgttatcgcagacaaaattcgcccaaacgttcagcgcaacgctcaaattttaggagaggaaataaggcagaaaacgcgtcccaaaacgcgacgtatggaactgtgtttacagccacttcttccacttgaagatccagtacggcacaacggctgcgatcagcatcatcaccagcgccagcggatagccgttcacccattcgagttccggcatcaccttgaaattcatgccgtagatcgatgcaatcagcgtcggcggcatcaagactaccgccatcaccgagaacagcttgatgatgttgttctgttccagattgaccacgccgagcatggcgtcgagcacgaaggtgatcttgttggagagataggaggcgtggtcggtcagtgaggccacgtcacgctgcatggtcttgagctgctcgcgcatgtccttggaccacttcaccccttccacgaccgccgagaggaaggtgacgaggcggccgatcgagaccaggctttcgcggatcttcgaggtcaggtcgcctttgcggccgatcgcgatcaggatctgcgaatattgcttggcgtggccgtggcgcgcgctctcgggctcgaagatgtcgtgcgaaacctggtcgatgtcggccccgcagcgctccaggagatcggcgcaacggtcgatcaccgcatccagcagttccatcagcacctgctcgccggtgatgccgggggcgcaggcgcgagccagcttgttctcgaccagcgcgaacggcttcggcagatcgtagcgcaccgtgaccagccggtggctggtcaggatgaaggtgaccgcggtggtgcgcggcatgtcggtgtcagactggcacatcagcgtcgcggtcatgtagcgggcgctgttctcgatatagagccggctggagatctcgatctcctgcatgtcttcccgggtcggaaccgcgatccccgccagcctctcgacggcccggtcctcctcgacggtcgggttcaccagatcgatccacaccgcgccctccggcagcgcgccgaggtcggtggcggcggccttcttgagggaaaggtcggagggaacgaacaccgacagcatcacgaactccgagataaagggctggaaacaggaggcagggcccgccggcttagcgcgattctggctggcgcttcatgaccggggcattaaccgggcgtccatatttggggcagccggttgggaatacgttagcctcccctcgacgaccgttgcctgtttgcacaaaaaaccaacccgcgccagaacagttgcggcaaaaaagccacagatcacgtcccgcgatgcaggaaagccatctaaagtctgggaagaatggcgggtttcaggcaataatgccgctcatggaatcgtggcgtttggggcgtatttttggcgctttcgggcgcgggttttcgattggaatgtaatcatgtcgtcgttcaaaattaccctcggaatcctggccgcgggcctgatgttgtcgggctgcatgcaggccacgacctatgaggcaaccaatactgcagccttcaagccgcgtgacaaggaactgctggccaagaccacctacgtcaagacgccggtggccgaaccgttccgccgcgccatcgtcgaatatcaccgcaaggaagccgccggctcgatcgtggtcgattccgacaatcattacctctactacgtgctgaacgacggcaaggcgatccgctacggtatcaccgtcggcgaagaagccatggcctggtccggcattgccaaggtcggcagcatgaccgaatggccggcttggcaccccacccccggcgaaatctcgcgcctcggcgttccgactttcgtggcaccgggcccggacaatccgatgggctcgcgcgcgatgtacctctactcgggcggcaaggacacgctgttccgcatccacggcaccaaccagccggaatatatcggatcgtcgatttcctcgggctgcatccgcatgaccaacgaggacgtcatcgacctctacaaccgcgtcaagctcggcaccatcgtcgtggtgctggagcccaagcacggcgactcgccctacaagccgcagatggcgctgcagggcggcggcaacgtcccctactgacgccgatcacgtcgcaaccgcgatcaaaagcgccggctttgccggcgcttttttgttggctgcggcttggtctccgccgcactctcgggcgcggctgcatcatctgatttcgcggcgtccggctcatcggccttgccgtgatccgccttgggagcgtccggcctggatgcatccgatttctgggcgacctcgcgcggcggcgcctcttccggtcgctcggccggcaacagcggcgcgacctgcggcagcgggtcgtacacgttccattggcagatccggtaattgctgcggcgctccgcgaggtcgagatggatgtggtcctcatggtaccagtccgagcccggaccgagcacggtggagaagcgagcgcacaccgaatgcagcacggtctcgcgcagatcacgcggcacgctgcggtcggtcagcgagatcgatttgccgttggcaagaccgaacgcgcgcacgtcgagcgcattggcgcggccatgctcggagagctgcgcgccgacgatgcggttgcggccgcggcattcgaacgagtcgaaattgtcgagattgctgatcccgcccccgaggcgctgcgccagcggcgcgatatcggtgcggacccagtcggcgaccgcagctgccatcttgcagcggaggatcgccgcgggcttgaccgcgaccttgcgcttgtccggcagcacgatggcctcgagccgcaccagatcctcgccgccgcagccgccggcgccgtggatatcgggaatgctcggcgcgagcgcgacgtcctccgagagcgcctgccggcaggccgaaagctgtggcctgggcggctcggtcgattttgtcacttcagccggcttggcggtctcggcgggcgcgccaggtcgttgcgtctcggctgcgggcggctcaggcgctgcggccggcggcacttccgatgccgccggcgtctcgtttgccgccggtgcctcggcaggcctgggcttcggcagcggcaccgctgaacggcgcaccgccttgtgtgaccgctgcggccgggtgccgaacaaatcgtcccacggaaggctcggcccaccgcgggcggctgctgcggggcctgcctgcatgccaaggcaaagcagcccggcggcggtaaccattgccgcacccccgcgacgaaacgcgccaacaggccattttcggcttgctttctccgcgctacagttcatgtcaattccatgattttactgccggccgtccaagatgccggcagatcatgcgtgaggatcgaggagggatttgcgtatgcttggtttgatgcaagattggcccttgctgtgccacaagattatcgagcacgccgcgaaatatcacggcacgcaggaagtcgtgacccggtcggtcgaaggccccattcatcgcaccaactacgcccagatccatgctcgcgcactgaaggtttcgcagagcctcgaacgcgacggcatcaagctcggcgaccgcgccgccaccatcgcctggaacacctggcgccacctcgaggtctggtacggcatcatggggatcggcgcgatctgccataccgtcaatccacggctgtttccggagcagatcgcctggatcgtgaaccacgcccaggaccgcatcgtcatcaccgacctcaccttcgttccggtgctggagaagatcgcgagccagctgccgagcgtcgagcgctacgtggtgctgaccgacaaggcgcacatgccgcagaccacgctgaagaacgcggtcgcctatgaggactggatcgcggcgtccgacggcaagttcgagtggaagaccttcgacgagaacaccgccgcggcgatgtgctacacctccggcacgacgggcgatcccaagggtgtactttattcgcaccggtccaacgtgttgcacgcgctgatggccaactcgaaggacgcgctcggcacctccgcctcggacacaatgcttccggtggtgcccttgttccatgccaacagctggggcatcgcgttttccgccccgtcgatgggcaccaagctggtgatgccgggcccgaagctcgatggcgcctcggtgtacgagctgctgtcgaccgagaaggtcacccataccgcgggcgtcccgacggtgtggctgatgctgctgcaatacatggccgccaacaatgtcaagctgccggatctgcagatggtgatctgcggcggctcggcgatgccgcgctcgatgatcaaggcgttcctcgacatgggcagccaggtgcgccacgcctggggcatgaccgagatgagcccgctcggcacgctggcgacactgaagccgccattcaccgaacgcaccggcgaggagcggctcgacatcctgcagacccagggctatccgccgttcggcgtcgagatgaagattaccgacgatgccggcaaggagctgccgtgggacggcaagaccttcggccgcctcaaggtctcgggtccggcgatcgcgaaggcctatttccgggtcgatgccaacatcctcgacgatgccggcttcttcgacaccggcgacgtctcgacgatggacgagcacggctacatgcggatcaccgaccgctccaaggacgtgatcaagtccggcggcgagtggatctcctcgatcgatctggagaatctcgcggtcggtcaccccgcggtcgcggaagccgccgtgatcggcgtccatcatcccaagtgggacgaacggccgctgctgatcgtgcagctcaaacagggcgagagcgcgacgcgcgaggacatcctgaagttcatggacggcaagatcgccaaatggtggatgcccgatgacgtcgccttcgtcgacggcattccgcacaccgcgaccggcaagatcctgaagacggcgctgcgcgaccagttcaaggactacaccttcccgaccgccgcggcgtaggcggattctccctctccacccttctccccttgtacaaggggagaagggaagaaggcacccaaatcccttgaattcgccgcaggtccgtggtctcacacggacattggcggcggctgaggtcgcccaaggacatctcaaccggcagatttttcgacgatggcgcgcaggttttccgctccctaccagcaggagcccgtgtccggtctcgccacctggtcgcgcaatctcgcgatcttttccatcgttgccgtggtggtctcgatcctgatcgtccggttcgggttcctggaggtcaaaccggcgctcgcgactttcttcggcgcgctgggcctcgccggcctgtcgatcctgctcggcctcgccgccttcgcggcgatctggcagaacggcacccgcggcatgggccgcatcctgctcgcgttcctgatcgacgccgcgatcctcgcctacccagcctacctcacctatcagtacaacaggctgccgcggctctacgacgtcacgaccgacccaatcgacccgccgcgcttcgaggcgctggcgcgattgcgcaccggcgaaggcaccaatcccgccgcctacgccggcctcgcttcggccgagcggcagcgtatcgcctatccggatatcgagaccgtcgagctcgaggtcccggctgaccgcgcttatgagatgacgctgcggctggtgaaccgccgcaaatggcttgtcatcgacgcacgcgcgccgcagccgccgcgcaatgtcggccgcatcgaggcggtggcgcgcacgccgatcatgggctttcgcgaggacgtctcgatcagggtcacgcccgacgatgaggattcgcgcatcgatatccgctcggcctcgcgctatttcgacaccgatctcggcagcaacaccgcgcgggtgaggaagctgatcgaggacctcaattccgccgccgaaaacgacaattccaagccggcgaagaaggcggcgcctgccgcaccgaaggcgccgccggcgaagacggtgaagaagtaatctctccccgtcattccggggctcgcgaagcgagaacctggaatccattttgctgcagaacctgcggcccgatggattccggnnnnnnnnnngcgaagcgagaacctggaatccattttgctgcagaacctgcggcccgatggattccgggttcgtgcttcgcacgccccggaatgacgaatgagggaggcttacaccatccgatacgtgccgccgatcaccggatcgccatcggttgccacgaccccgcgcgcgaccaggtcttccagatgcgccagcacggaatagccggcggcattggcgaggcgcggatcgagcccgatatagatcgcccgcaccatggtcgggatgtcggcctcgcccttgccgagacggtgcaggatcgaagcctcgcgcgcccggcggtgccgcgccaggaagcggacgtagcgcgggccctccggaatctccgggccatggcccgagaaatagagctgctcggggcgctgctccagccgttccagcgaggccatgtagtcgatcatcgaaccgtcgggcggcgccacgatcgaggtcgaccagcccatcacatggtcgccgacgaaattgatgctgcgttcggtccaggcaaaggccaagtgattggcggtgtggccgggggtggcgaccgcctccagtgcaaagcccgcgccttcgatgacgtcgccgtgcttgacctcgacgtcgggccggaaatcgcggtcggcgccggattccggattgtgcttctcgctctcgaaacgcgggcgcgaggcgcggtgcgggccttcggcgtagaccggcgcgccggtcgcggccttgatccgcggcgtgttcggcgaatggtcgcgatgggtgtgggtgaccaggatatgcgtcacggtctcacccttgaccgcgtcgagcaacgccttggcatgcgcctcgtcgtcgggaccgggatcgatgatcgcgaccttgccctcgccgacgatataactgaccgtgccggtgaaggtgaacggactcgggttgttgcagagcacgcggcgcacgccgggccggacctgttcgaccacgccggacttcagcgggaaatcgcggttgaacgggatgtcgtcattgtcggccatgggaccgcccctattggctctcgtaggatgggtagagcgaagcgaaacccatcacgcgaccgcgcgctgggcggcaagatgggtttcgctgcgctctacccatcctacgctgtcggtgcggcgcgtccttacgagaacgcctggatgccggtgatggcgcggccgaggatcagcgcgtggacgtcgtgcgtgccctcataggtgttcaccgtctcgaggttcgcggcgtgacgcatcacgtgatactcgatctggatgccgttgccgccgtgcatgtcgcgcgccatgcgggcgatatcgagcgacttgccgcaattgttgcgcttgacgatcgaaatcatctcgggcgccatcttgccctcgtccatcaggcggccgacgcgcagtgaagcctgcaggccgagcgcgatctcggtctccatgtcggcgagcttcttctgcaccagctgggtggcggcgagcggccggttgaactgcttgcggtcgagcgtgtactgccgcgcgcgatgcatgcagtcctcggcggcgccgagcgcgccccaggagatgccgtagcgggcgcggttgaggcagccgaacgggcccttgaggccggagacgttcggcagcagcgcgctttccggcaccaccacgttgtcgagcacgatctcgccggtgatcgaggcgcgcaaactgagcttgccgccgaccttcggtgccgacaggcccttcatgcccttctcgaggatgaagccgcggatctggttgtcgtgtgcggtcgacttggcccacaccacgaacacgtcggcgatcggcgcattcgatatccacatcttggcgccgttcagcttgtagccgtcggcgaccttctcggcgcgggtcttcatgccgccgggatcggaaccggcgtccggctctgtcaggccgaagcagccgacccattctccggtcgcgagcttggggagatatttcttgcgctggttctcgtcgccataggcgtagatcggatacatcaccagcgacgactgcaccgagttcatcgagcgatagccgctatcgacgcgctcgatctcgcgcgcgacaaggccataggccacgtagctcgcattggcgcagccatattcctcgggcagcgtcacgccgatcaggccgagctcacccatctcgttgaagatctcgcgatcggtcttctcttccagataggccttggtgacccgcggcagcagcttgtcctgcgcataggcccgcgccgtgtcgcggatcaggcgctcgtcttcggtgagctggtcgtcgagcaggaacggatcatcccactggaagctggcggcagccggcttgtccttggcctgggggcgcacgctcatgaaacatcctttcgcatcgtcactcggaaattggcggataaattaaagcgctatgccgcgaagcgcaattgaattgggcgaatgccgtggccgggggcaatgcgcgcatcaccccggaatgacccgcatcagacgtcgaacttctcgttcgacacgatctcgatgccgaaaccggacaggcccttgtagtcgtgcaccgacgaggtcaaatgccggatcgaggtgatgccgagatcgcgcaggatctgtgcaccgacgccgacctcgcgccattgcttgttgcgatcggcctccgcggtcttctggtcgccaaccggctggaccggaacaccggcggcaccatcgcgcagatagaccagcacgccgcggccggcatccttgaagtgccgcaacacggcttccatccgcgccggcccggtgaacaggtccttcacgatgttgggcttgtgcagccgggtcagcacgtcccggccatcgccgatgccattatagacgaaggcggcatgcatgatctcgtcgaacggcgagcgataggcatagccctgcaacggaccgatcgggctttcggtggtgaaggtcgcgacccgctcgatcagcttctcgcgcgcctggcgataggcgatcatatcagcaatcgtgacatgcttgagcttgtgcgcggcggcgaatttcgcgacctgttcgcccttcatcacggttccatcgtcgttcatcagctcgctgatgacgccgaccggcggcaggccggagagccggcacagatcgaccgctgcctcggtgtggccggagcgcagcagcacaccaccgtcgcgcgcgatcagcgggaagatgtggcccggccgcgcaaaatcattggcgccggcgttggggttggcgagtgcgcggcagcacgaggcgcgttcctcggccgagatgccggtgcccccatcgggcttgtagtcgatcgagacggtgaaggccgtggtgtggttggactcgttgtgcgccaccatcgggtcgagccgcagccggcgggcgtcctcggtggtgatcggcgcgcagacgatgccggaggtatggcggatgatgaaggccatcttttccgctgtgcagaacgacgccgcgacgatcaaatcgccctcgccttcccgatcgtcatcgtcggtgacgacgacgagttcacccttcgcaaaggcttgcagcacttcctggatcgtatcggccattgtcctgacatctcgctttatgcaggcagtggattagccgggttccgatgtcggcgccagtatcattatgcaacccgccatgcgtccggcaggcataccagggcggtatcggcacccgttggctccatccggactacgcagcggcctctaaggcagcacctcgcgccggtcggcgagctgggcgtccatttcggcgcgcttgtcgtcgagaaggccggcgtcggcggcctcgatcaccgaatagagctcgccggcgtcgctgagccgcgtcaccgtgacatagtcggcaccggcctcgtagagatccgcgacgccggacagcaggtccgcggtggcgacgatccgcgcgtccggattgagggcgcggacgtggcgcaccagcttctcattgtcggcgccgaccaggaggaaatccggcacgctcaggatgatgatctcggccttgccgatgccggcatgcaccagcgtatcgacattgctgatgtcaccatagatcacgtgcatgccgcggtcggacagcgtgcggaacaccagcgggttgaagtcgatgacgctgatctgctcgagcagcgactggttctgccgctcgatctggctgatcagcgcgctcgcggcgcggaaaaagccgaggatgacaatgcgccggatctcgccatgtcccccctcctggctgccctcaccgcggccttcgcccacgtggtcgagatcgcgcagcccgatccgcttcagcggcccgatcaggccgcgtacgatctggtcgctgcggcccatcgcgaaggtcgagagcaccgccagcaccacgaaggcgaacgaggccgcgctcgcggtctcggtcccgatatggttggcggcgacgccggtctggatcaccaccagcgagaactcggagatctgcgccaggttgatcgccggcagcaggctggcgcgcaggccctgcttcatcaggtaaagcggtgtgaacgtcgtgaccaggcggctcaccaccgtgaaggctgcgatgacgagcgccagtccgatcacctgcaggcccgggatcgggatcgtcatgccgagcgccacgaagaacagcgtgatgaagaaatccctgagcgtcgtgaccttggcggtgacgtcgagcgcgtagggaaatgtcgagatcgagacgccggcgaccagcgagcccatctcgcgcgacagatgcagccgctcggcgatctcgccgatcaggaagcaccaggcgagcgcgccgagcagcacgagttcgggcctgcgcgcgatctggtggaacaaccgcggcagcacataacggctcaacaccaatgcggtcgcgaccagtaccgcgacgcgggcgatcgacagcagcacgacgccgatctgcagattgtcgaggctcggctgcaccgccaggaacaggatcgcgaagatgtcctgcagcaccagcacgccgagcgtgatccggcctggcagcgtgtcgagctcgcgcttctcgtagagcaccttgacgatgatcacggtcgaggacagcgcacaggcgacgcagagatagaccgcgtcgaacctgccgccgccgatcgcgagcccgattccggcaaagaacgcgatgccgatcaggcagccgccgaggagttcgccggcgccggcgaacaggatgaccttgccggcgcggatgatcttcttgaggtcgatttccagcccgatcatgaacagcatgaagatcagaccgagctcggagatgacgctgatcgactcctgggacttgacccagcccatcccgaatggaccaatgaaaaagccggcgataagataggccagtatcagcggttgccgggagaaatgggcgagcagcccgatcccccaggcaaacaggatacagagcgtgatatcgcgaatgagttcatgcatgcgtcaaagacttccgttgccgcaacctagagggccgggcgtgaggatcaaccgagcaatgtgtcacatccgcgcaggcggcatttttctggcagttttgctctgcctgctcaccgtgcgcgtgaccgaggcgctagcacaatcctccgcaagtattgaacaaaatttcgcgaactcgctgaccgcggtaccatcggagggcctcaccgcaacaggtgcattctatgtgccggtgtattccagcgtgtcgatgagccagggcaagcttcgggccgatttctcggtgacgctcagcgtgcacaacgcctccgaaaccaggcccctggtgctgaagcggatcgcctatttcgacacatcaggcaagatggtggagagctacctcaaatcgccgatcgcgctaaaaccgtttgctacgatcgaggtcgcgatcgccaccaccgatacccgcggcggcaccggcgcgaatttcatggtcgattgggcggccgccggcgaaatcgcggaacccgcggtcgaggccctgatggtcggcagcgtcggcgccgggcattacgccttcatcagccagggccgcccgatccggctggtcggcaagaactgaattgaactgacttcacggaaggccgcttcccgcggaccttctcaacgacaacaacacggagcgaaacgtccatgtccacctcagcccagttcgactttgcaccgctgctcccggccggcctgcctgcgccggccgcgcgctggaccgggctcgccaaatacagcttcgtcggcggcaacaacgatcccgagcaggtgccggtcgacggcttgctcgaagcaatgaatgccgtgctgaagcgtgagggaaggagtcttgcgacctacaacctcgcgcatggaccgcagggctatctgccgttgcgccagttcctgaccgagaagctgaagcgcgatgccgggatcgcctgcacggcggacgagatcatgatcgtctccggctcgctgcaggcgctcgatctggtcaatcagacgctgcttgccaagggcgacaccgtgctgatcgagcaggagacctatcagggctcgctgaaccggctgacccggctcggcgtcaatgcggtcggcattcccctcgacggcgagggcatccggatcgatgcgctggccacagcgctcgccgatcacaagcgacgcggcatcacgccgaaatacatctacaccatcccgaccgtgcagaaccccaccggctcgatcctccccgagagccgccgcgccgagatgctgaagctgtccagggaatacggcgtgccgatcttcgaggatgattgctatgccgacttgatctggaacggcgaacggccgcccgcgatctacgccatgagccagcatggcggcgtgatccatatcggctctttctcgaaatcgatcgcaccggcgctgcgggtcggtttcatggttgcgccctgggagatcatgtcgcggatgctgccgctgaagaccgatgccggctcgggtgcgctggagcagatggtgctcgccgaatactgcgcgccgcatttcgcgacccacgtgcccaaactgacacgaggactgcgcgcaaaactcgacacgctgatggaggcgctcaacgagcagttcggcaccgcggccgagttcgaggcgcccaagggcggcatcttcctctgggtcaagctgcccgacaatgtcgatacgttgaagctctaccaggcagcgctcgccgccggggtctcgatcaatccaggcccggaatggtcgaccagcaaggcccattccggcagccggctccggctctgcttcgcgagcccctcgcacgaccagatccgcgaaggcgtcgccgtgctggcggaagtgtgccgcaaggaattcggcgtgcccgcgcgcagcggcaatgtggagaagcgcggctagagcgttttcgagcgaagtggataccggttcgcgtgaagaaaacgcgtctagataagaatctagagtcccgttccgattcaatcggaacggagctctaggcagacaccgccgagccaagttcacggggccaagtgaaactccacgttcacctggccgcttccgctcgacgggaagtagtcgcagagttgctcggcggggccacggaaatcgtaccagccgagcgccgcgaacagcatgatggtgtcggccatcccgccttcgccgtggcaccgcgtggcgtaatcgggaagcatatcgagaaactcccgatagcgacgctgctgccaaagctccagcacgcgcaaatcgacctggcggttgaactcgctggcgatcgacgtccaggcatcggcgccgagcttcttgttcggcaacaaccgatgcgacagcgatccgctggcaagcagcgcaacccgctcgccggatcgggcgatcgcacggcgggtcgcttcgcccagcagccggctctcctcgatcgatgtgaacagcggcgacgcgaccgagaccaccttcgcccaaccctccgggttgaggtagtgcatcgggacgatggtgccgtattccagaccaaggctctcgatctgatgcgccatcacattgaggccgtcgcttgccgcctcgcgtgcgatcgcttcggcaagcgacgtgttctccggcaaatcgtagcccagatccttgatcatctgcggcgcttcgtggctcgtgaacgagccgcgatgccaggcattggcgttgatgtggtagccgaaattcgatagccaatgggtatcaaataccacaaaggacgataccctgcgatccctggctcggcggccgagttcgcacaatgctgccaccgcgcccgctctcacatcgtgcagcgggtgatcggcaggctccgatagcatcagagacggtacatggctgactttggcggcaagtacgagttcgcccatcgaagcaatatcctcttccggtcaggctgccttggtggcgacgtcgcggaacgcgttcaagatgcgcagcagcagcacgatcgagacgttgcccttgcccgcttctatgagcgcaatatagcgctgcgacacgccagaccggcgggccagttcgcgacgcgtcataccggcattcgcccgcgcgccgcggacagccgcgcccagctgcagcaggaaatcactttcggagaacggtgcgcccggcgcggaagaacgtaccgatcggtcgatggaggaatgattcccggtcacgacgtgcccctttatgattgctcatcatcgaccagcgggatttgctgtcgttgatgcggatcaatgacaggggtcgccggggcaggcggcctaccgcaccgaaaatggcgcctggtagggccggccgaacggcacgccgttgaccacggtctgcaccggcttcagctgcaggttgccgtcgcgcttgttgttgcgggtgtcgacgaaggtgaccgggccctcgacgaggtccatgatcgcgacatcggcgggcgcgccacgctgcagcgtgccgatcttcggggtgcggttgatgatccgcgccggcaccgaggtcgccatcgcgacgacctgatccagcgacgagcccatcgccaggaacttgctcatcacgttcggcaggaacgggacgcccggcgagttgcctgaaaagacgtggatgtcggacgagatcgtatcgggcgtgcagccggcagggatcgcgacctccgccaccgtaaaatcgaagctgccgccgccatggccgacatcgaacagcacgccgcgctgcttggccgcgagcgccgccggcaacagcttgccgtcctgcacgatgttggtgaaagcccccgacatgttcggcgcgcccgaataggcatgggtgaggatatcgcccggccgcagcagatcgaggatggcggacatcaactctctggtctcgacgccgccgatatgcaccatcatccgcgccggccagccgcacatctcgcaggcctggatgccgcgcttcagcggctcgatgccgtgcttgaagatgacgttttccgacattcgcaccttgaccccgatcaggaagtccgggttctcggcgagtgccattgcgcaggcttcgacctgggcgttgtcgatgttgtagagctcggccaccggaaaggccgacaggccgttgttggcgatatggacgaaggcgtagatccgcgtccgcgactgcgccacgatgaagcgccgcagcgccgcaagattgttgacgccggcatcgccggccgagaccacggtcgtggtgccctggaattgcaccagctcgtcggcgggaatgccgatcgccgatccgtaagggtagacgtggcagtgcagatcgaccagccccggcatcacgagcttgcccgacgcgtcgatggtcttgctggcgcgggcgaccgggatctcgtcgtcgatcgcctcgatcaggccccagcggatgccgatatcgcgcttgccgcgcagcgactggcttggatcgatcacgtcgccgctcttgatgacgaggtcgaacttgtcgtccggccccatcgccgcagcggccggtcctgcaatggcggcggcagcggccgatcccgtagctttcaaaaaaacgcggcgcgaaattccactcacggcaacgtcccccgaacattgatttttatggtgtgatgatgcgtcggacgcagaagttaggcaaggccacctgaacagccgttaagaaaactccgccagttcctgaggaacgtttcgatgcctgcacggtttcctcctcgcatcatttgaggaggacgaaatgaaaaagattggttttgttcttgcagcgatcggcacgcttgcagtggccgttccgtcgatcgcgaacgccgagaccgtcgtgatcaagcgcggccatcaccatcactgggatcgcggctggggcacgcgcgccgagatgcgccacgaccgtggttggcatcgcggctggcatcacgaccatgaccgagcggtcgtgatccggcgcgaccgctactaaccaccgacacgtccaagaggtcgacacaacggaaaatggctccttgcggagccatttttctttttcaacattcacatcggatggtcgacggctcaatcccacgccggggcaaaacccggattgacgcagcgcatgtccttgcgcagcgcggcgatcaccttgcggtcgtcgtcatcgagctcgaccttcagcgcatcgagattggcgctttggctttctgcgcgtgacgctttcgggatggccgcaacgccatcctgatcgagcagccatttcaacgccacctgggctgcggtcgcatcatgcttgcggccgatctttgccaaggtctcgtcggtcgcgaaacggccctgcgccagcggacaataggccaccagcgggatcgatttcgcggcgagatatttccgcaccggcgtctgatccagcatcgcgtgatactcgatctggttgcaggcgatcggcgccctgatatcctcgaccacggtcttgagcagcgcggtggtgaaattcgcgacgccgatcgcgcgggtgcggccctcttccttcagctgcatcagcgtctcgaacacggcgggcagcttcatgctcttcgacggccagtgtaccagatagagatcgacgtgatcgagccgcagcttgttcaggctggcatcgaacgccttccggattgcatcgggcgccaaattctcgtgccagaccttggtggtgacatgcaggtccttccgcgcgaccttggaagccgcgatcgcctctccgatcgcttcttcgttgccgtacatctcggcggtgtcgatgtgccggtaaccgagcccgagcgcgctctcgaccgccgcgcggcaggcatcgccctgcatgcggaaggtgccgagcccgagctgcggcaggctgatgccctgtgtctgcagattgtccatggatagctcctgacgcgtgggacgccgatgaaatcgacgacgccacgccagcaaatcagctgaaaggaatgaaattggcagaactgccgagacgcagtctgcccgtaaaccggccctgcgggcaaggcgcctgcaatcaagatgtcgcgacgggataagggacggctctagatgtgctgcgccatgatctggccgggccgcgcgtccggccgcggttcgatgtcgaccgaccagagatcatgattgtcgacgtccttcagcgtcactttcatcacgccggtcttgccgtcgatgtcgacacggccgaagaattgcaggccgaagcacggcgcgagattgtcgccctgctcggccgaacagcccttctggtacatcgctttcgggccgaaagtgttgtcgagctcgccgggcgaccaggtgccggcatgcagcgggccggagacgaattcccagaacggctcgaactcctggaacaccgcgcggttcggatcgtagtgatgcgccgcggtgtagtgcatatcggcggtgagccacaccgtgttgcgcacgccggcgcgcttgatgaaggacaggagatcgccgatctcgtgctcgcgccgctcgggcgggccgtcaccgagcgcgacggcatcgaggctcacgagcccgatcggcaggtcggccgcgatcaccttccagacggcgtccgacgccgccagctcccgcttcagccagccaagctggctctcgccaaggatgaaggcctggtccggatcaccctgcttgttccagctggaatcgcgataagagcgcatgtcgatgatgaagacgtcgagcagcggcccgtaggcgatcttgcgatagacccggccgtcgcgctccggcatcaaccgcatcggcatgaattcatggaaggcgcggcgtgcccgcgccaccaaccgcgaattgccgtccgcatcatagccggtcgaatccgcagtgccgatcggcgcccagtcgtcggccacctcgtggtcgtcccattgcgcgaacataggcacctcggcgtggaaggcgcggaaatgctcatcgagccagttgtatttgtagttgccgcgaaactgctcaagagtctgcgcaacgacggatttctcctcggtgacgatgttgcgccagacctcgccgttcggcagcgcctgttgcggcggcaccgtgcaatccgcatagatgtgatcgccggaatggatgaagaaatccgggcgctcgttccgcatggtgcgatagctacgcaggccaccgcgcgcagggtcgatgccccagccctgcccgacgacgtcgcccgaccagacgaacgagaccgagcggcggtcgataggcgcggtgcggaaatgcccgacccggctttcgccgaccaggccgtcacgatcctcgaagctgacgcgatagaacaggtcctggcccggcggcaggccgtcgagcagcagttttgcggtgaagtcgcgctcgggcagcgcatcgaccgacgcactgcgcaggacggtggcaaagctctcgacggccgcgcattcgatccgcatgcgcgcggcacgatcggcgcgagcccagatcacagcggaatcgcttgcgacgtcaccggactggatgcccgcgatcgcgggacgatcggcggcgcggctcagatacggtcttgtcagcgagcccagccctgccagcgcggccgtcgacgccgagcgcaccagaagctgacgccttgtgaggcctcgccgcctcgcggagatcgctgtcggcattcagtaaccttcgtcatatcctgacgagggttttgcctgcgccgtttgactccgggcttacagtttcttgactccccgccgacggttttgcgacggcgggatgactctcgggtccccagacccgtcatccttgaggagcgcggaacgcgcgtctcgaaggatgaatcggcgaccgacggggccgtcgatccttcgagacgcgcgcaagtgcgcgctcctcgggatgacgggtcttgtgctgatgcggtgctcacgtgaccggcgcgagaccgcgagccgccctcaccgctgccagttgcaaatgccgccggtacggcacggccaggtctggatcctggtgtcgcgggcttccgcgtctagcgggttcgagtgccggcgcgcgagcttggcgcgggtgggaacgtgcgtggcggcacgcttccgctcttgcggcgcggtcactctggtcgtccgaacgggcttctgccgctcgaccttcggctcctcgaccttcgggtcgacagcagcatgctgatccggaccgtgatcggtctttgcctcgaccggaaccggctcgaactgtgccggcgggccgagcggcttcggcgacagcacggcccgggagagatcgaggctgaagaactcgctcggacgatagtcgtcagccaacgccacgccacccagagccaggcaagcggtacaaacggttgcaacgaaaacgcttttcaggaccgtcaaaaaggcctcctgaaatcactcgaacagaacagccatcatgtagggacccggccgcgcgaatccagccgctggttgcaggcagggttactggtcaaccaaggcggccgtggaaagttcccggcccctattccgccgcctgtgccagcggctggccgatcgcgcgctccaaccgcgcgcattcggtgcggtagcgggcgacattgccttccttgatatggccgtatccgcgcacgaggtccgcggccttcgccagcgccaccaggcgcggcagatcgagcggcttgttgccgtcgaggtggcgcaggatcatcgccgaatagtcgaccggcagcgcgcgctccatcttgcgctcggcggtgtagccgaagatgtcgaacgcagtgccgcgcaggcccttcaggccggccagcagcccgaatgccttgaatatccacggcccgaattcgcgcttctgcaaccgcccggtgaccggatcgcgctgtgccaatagcgggggcgccagcaggaccttcaagccggaattgccctcgaactgctcgcgcaacgccctgctgaattcgccatcggaatagagccgcgcgacctcgtattcgtccttgtaggccatcagcttgaacaggcccttcgcaaacgcctcggtcaggtcttgcgaacccggcgccgccgcggcctcggccgcgcgaacgcgcgcgacatcgtcgagatagcgctttgcgtaggccgcgtcctgataatcggtgaggaacttggcgcggaacgcgatcgcctcatccagcgtcttctttgccagcgctgcgcccgcgttcttgaagcgcgcggcgctgaccacgcgttgcagatcgtgcgcggcgagccggccccacgagaacgcggtcttgttcatctcgatcgccgcgccgttgagctcgatcgctttgaggatcgcctcgagcgacagcgggatcgcgccgcgctggaacgcaaagccgagcatgaaggcgttggtggcgatgctgtcgcccatcagcgcggtcgcaagcccggtggcatcgaggatgtcgagatcgtcaggtctcaccgcaccgttcagcgcatcgcgcatcgagctggcctcgaagtcgatatcgggatcgatcacgaagctcgcggtcggcagcaaatcggcgttgacgacggcgcgggtgaagccgcgctcggcgcggctcagcgccgggacgctggttgcaaccacgaggtcacaacctaggatcaggttggcattgccgggcgcgatgcggaccgtggtcagcatgtcggaggccggcgccagccggacatgactcatgaccgcgccgttcttctgcgacaggccggtgaagtcgagcgtcgagcaggcgagcccttggacatgcgcggccatgccgagcagcgcaccgatggtgatgacgccagtgccgccgatgccggtgatcaggatgttgtagggcgcgctcagcgcagccgccggcggcgtcggcaggtcggcgaacagcgccttgggatcggcggcggtgcggtcggccttgcgcagcttgggatcctgcaccatcacgaagctcgggcagaagccctcgatgcaggagaaatccttgttgcagttcgactggtcgatgcggcgcttgcggccgagttcggtctccagcggctgcaccgagacgcagttcgacgccaccgagcaatcgccgcagccttcgcagacgcgctcattgatgaagacgcgcttggccggatcgggaaacagcccgcgcttgcggcggcggcgcttctcggcggcgcaggtctggtcgtagatcaggacggtgaggccctcgatctcgcgcaaggtgcgctgcacggcgtcgagctcgcggcgatggtggatggtggcgccggacgggaagtaattggcgggatatttgtcgggatcgtcggagacgatcgcaagcttcttggtgccttcggcccagacctggtgggcgatctgcgccaccgtgaagccgccttcggcgggctggccaccggtcattgcgaccgcgtcgttgtagaggatcttgtaggtgatgttgacgccggcagccgcggcggcgcgcagcgccagcaaaccggaatgcgtgtaggtgccgtcgccgagattctggaacacatgctgttcgctggtgaacggcgcctgcccgatccagctcacgccctccgcgcccatatgcgagatggtctgggtgttgcggttcggcaccgacagcgccatgccgtgacagccgatgccggccatggcgcggctgccctcggggatcttggtcgacgaattgtgcgggcagcccgagcagaaatacggcgtgcgcgacagcttcgcggcgccggtgccctcggccgggcgatcgaacgcctcgagttttgccaggcgctgctccagcaacggactgcgatggccgagcttgcgcagccgcgccaccacggcggcagcgaccatcgtcggcgtcagctcgccttcgctcggcagcagaggcgcgccgctctcgtcgcgcttgccgaccaccgacggacgcttcgacgcgtccatgttatagaggatgtggaccagctggtcctcgacgaagccgcgcttctcctccacgaccagtacgtcctgcaagccttccgcgaacgcgcgcgcgccgttggcctccagcggccaggtcaacgccaccttgtagatgcgcaaacccagctcctgcgcctcggcatcggtgatgccgagatcggcgagcgcctggcgcagatcgagataggccttgccggtcgccatgatgccgagccgcgccggcttcgaatccagcacgatgcggtcgaagcggttggcgcgggcgaaggccgcgaccgcctccattttgggcccgtgcagcctgcgctcggcctccagcggcggatccggccaccggatcgacagcccgcccggcggcatctcgaaatcgtcgggcatgatgatcttgatgcgatcgggatcgctgacgatcgaggccgagctctccaccgtctcggagatcgccttgaagccgacccagcagccggaatagcgcgacagcgcgaaaccgagaatgccgaggtcgagatagtcctgcagcgtcgccggattgaccaccggcatcagcgccgaggcgaacacctgctcgctctgatgcgccagggtagaggactggcagccatggtcgtcgccggccagcgcgatcacgccgccattcagcgaggtgccggccgaattggcgtgcttgagcgcgtcgagcgagcggtcgacgccggggcccttgccgtaccagatgccgaacacgccatcgaccttggcgccggggaacatgccgacctgctggctgccccagaccgcggtcgccgccaaatcctcgttgaggccgggaacgaacgcgatgtcgtgctctttgaggaacgatttggcgcgccacagcgcgtgatcatacatgccgagcggcgagccgcggtaaccggagatgaatccggcggtgttcagcccgtgcgcgcggtcgcgttcgcgctgcaacatgggcaatcggaccagagcctgggtaccggagaggaagattcgcttggtgtccaaccggtacttgtcgtccagtccaacgtccatcaacgccatcagtttccccgtcagtcagccacgccggtccgaaccggtctcattatcttcggaatgatcatgcatcagcatgcactgattttgttatgcatgaacagcctcgttccatggccccaacacatatctcgatgttgcgtgcgcgaggcctcgaggcttgccgaaccccggcatctttgaaacggtgcgcgcaaagggagaccaaggatgataagagtcgaatccgcgttcacgacggaaatcgtggagaacggcgatctgctggtgggtccctggcgcagcccgaaacagatgctgcaggcccagacctacgactcccacgcctcgattcacgacgacgcaaccgcgcagaagctcggcttccgcggcggcaccatcgaggggccgacccatttcagccagttcgcgccgctgtgcgagcggatctggggccgcacctggttcgagaccggctgcctgtcggcgcattaccgcaacccggtgttcgagggcgaagaggtgcaggcccagatcgagaagccgaaaccgggccagacggtttgcgcaatcggaatgatcaagcgcgacggcaccgagatcctgcgtggcacggcctcgatcgacggcgacggcaccgaaacagcgctcagccgccggctcggcgagctgaagccgctgaccgatccggtgatcctcgccgacatcaaggtcggcatgaagacggcccggcaggcgatcaagatggatttcgaccagaacatgggcgacctctatccgttctcgctggccgacaagctgaaagtgatcaccgaaccctcggatggctactacgcgcaggagcacaatccgtggggtcgcgccgtcatcccgatggagatgctcagcgtgctgttccagtaccgcgcgcgcgaggaccggctgccggtccgtggccccgcggtcgggctgttcgccgaccaggagatccggctgctgcgcgggccgctgttcccgggcgagacctattgggtggagcgcgaggtcgtggcgctctccggcagcaagcgcaccgaaagcatgtgggtgcgctcgaccgtgttcgacgccgacaacgccgtggtcgcaaccatgctgctcaacggtgccagcatgaaggactcctacgccaactacgccggcgagcacaaagccctctacggctgaagcgccgcctctcccgcaagccgccgaacaaggacaacaacaatggcccgcctgccctatctcgaagccgaccaggtcgcccccgagtatcgcgacatgctcaagcgcaacaccaacctgcacaagctgctggtgaactcaccggacatggcacgcgccttcaatggaatcggcggctacatccgcttcaagagcaagctcgacccgcgattgcgcgagcttgcgatcctgcaggtcggctggctggagaagtcggaatatgaattcacccaccatgtgaagatcggcaaggagttcggcgtcaccgacgaggacatcaagggcctgatcgcggagaccgacggcaagccgtcgcagctcgagccgctggcacgagcgatcctcaggggcgcccgcgagatggtgcgcgagctcgcgatgtcggaggcgaccttcgccgagatcaagaaagagctctccgacgagcacatgaccgatctggtgctgacgatcgcgttctactgcgccgtggtgcgcgtgctcgccaccatgcagatcgacaacgaacccagctacaaagaagtactgcagcagtacccgatcccgggagtgaagtgacatgcgccttagagatcgcgtcgccatcgtcgtcggcgccggccagagccctggcgagggcatcgggaacggccgcgccaccgcgctgaccttcgcccgcgaaggcgccaaggttttgtgcgtcgatcacaatctggcgtcggcgcaggaaaccgtcgacctgatcgtggccaagggcgggactgcgaccgccttcaaggccgacgtcacgaaaaacgccgacatcaaggcgatggtggcggatgcgcatggccgctggggcagcgtcgatatcctgcacaacaatgtcggcgtcagcctctccggcggcgatgccgagttgctcgacatatcagaggaggcgttcgaccgctgcgtcgcgatcaacctgaagagctgcattcttgccgccaagcacgtgatcccgatcatgcgcaagcagcagagcggctcgatcatcaacatctcgtcgatggccgcgatcacgacctatccttacgtcgcctacaaggcgaccaagtcggcgatgatcgccttcaccgaacagctggcctaccagaatgcgcaatatggcattcgcgcaaacgtgatcctgccgggattgatgaacacgccgatggcagtggacacccgcgcccgcgaattcaagaagacccgcgccgaggtcgaggcggagcgtgacagcaaggtgccgctgcgtcacaagatgggcacgggctgggatgtcgccaatgccgcgctgtttctcgcctccgacgaggccaacttcgtgaccggtgtcacgttgccggtcgatggcggtgccagcgtgcggcgcggctaatcgagaccattaacccctgtgacgctgtgcagttaatctctgtgacgcaatcacgtgtttttgcgccgcaatgattcgaaaaaattgaagtattccaatgacacggcgatgtgacggcgtgtccacataaatcgaaatcctgactcgttgtggtcgcacgaaattcatctgcgctctgtatctcgcacgccaagaacttctggagtgcctggaccaatgagcgaagaattcgaactcagacccgatcagtgggatgcgctgaaagcgctgcgggctcccgcagcaaacccgtcacggctgaaccggttcgccgtcgagagcctgatcacgctcggctatgtcgcgatacgtggcgacgcgtttgagctgacgcccgcgggccgcaaggtgctggtccgtggttcgtcacttctgctgctcgatatcgcagcttgatcccttccaagctgacatcaagcttacacacgcggcatcatgccgcgtgtgcttttccggggatggtcgcctcgccgtgctgggtcagcggcttcatgccggtgacggtgcgcagcagcacatagaacaccggcgtcaggaacaggccgaacaccgtgacgccgatcatgccggagaacaccgcgacacccatcgcgcgccgcatctccgagcccgcaccggtcgagaggaccagcggcagcacgcccatgatgaacgccatcgacgtcatcaggatcggccgcagccgcagccggctcgcttcgatcgcggccctgatcggcgagcgcccggcgaattcgagctcgcgcgcgaattcgacgatcaggatggcgttcttggccgacaagcccaccagcacgatcaggccgatctgggtgaacacgttgttgtcccccttcgacagccagaccccgaacatcgcggccaagagccccatcggcacgatcatgatgatcgagagcggcagcgccaggctctcatagagcgcggcgagcaccaggaacaccagcaggatcgccagcgggaacacccagattccggaattgccggcgatgaactcctgataggtcaggtcggtccattcgaaggcaaagcccggcggcagcgtttcggctgcgatccgcgtcgccgcctcctgcgcctggccggacgaatagccaggcgccgcggcggcgttgatatccgacgacaggaagccgttatagcgaatcgcccgctccggccccgcgctctggcggaccttcagcagcgccgacagcggcaccatgtcgcccgacgacgagcgcaccttcaactgcctgatgtcgtcggcccgcgcgcggaacggcgcatccgcctgcacatagaccgaataggtgcggccgaatttgttgaagtcgttgacgtagtaggagccgagatagatctgcagcgtgttgaagacctccgtgaccggcacgccgagctgcagcgccttggtgcgatcgatgtcggcgaacagctgcggcacgttgacctggaagctcgagaacacgccggcgatctccggcgccttctgcatcgccgtcatgaacgctttggtggcgtcgttcagcgcttcatagccgagacccgcacgatcctcgatctgcagcttgaaaccgccgatggtgccgaggccattgaccggcggcggcgggaacatggcaatgaaagcgtcctggatgccggcatatttcttgttcagtgccatcgcgatcgcaggtcccgagagcgacgggtccttgcgttcattgaacggtttcagggtcgagaacacgatgccggcgttggacgaattggtgaagccggagatcgacaggccggggaatgccaccgagctttcgacaccgggctgggtcagcgcgatgtcgctcatcttgcggatcacttcctcggtgcggtcgagcgtggcgccgtcgggcagccgcgcaaagccgaccagatactgcttgtcctggcccggcacgaagcccgacggcacctgcttgaacagcacgccggtcaggccgatcagcagcacatagaggccgatcaccacggccttgccgtagatcacattggtgacggtgcggccgtagttctcggacgacttggtgaagaccttgttgaagccgcggaagaaccagcccagcgacctctccatgatccgggtcagccagtccttgggctcgtgatgccccttcaggagcagcgccgacagcgccggcgacagcgtcagcgaattgatcgccgagatcacggtcgagatcgcgatcgtgagcgcgaactgcttgtagaactgtccggtgaggccggagatgaaggcgagcggcacgaacaccgctatcaagaccagcgcgatcgcgatgatcgggccggacacttcgcgcatcgcctggttggtggcgtcgcgcggcgacaggccggactcgatattgcgctcgacgttctcgaccacgacgatggcgtcgtcgaccacgatgccgatcgccagcaccaggccgaacaggctgagcgcgttgatcgagaagccgaacacatgcatcaccgcgaaggtgccgacgatcgacacaggcaccgcgatcagcggaatgatcgaggcgcgccaggtctgcaggaacaggatcacgaccagcacgacgagcgcgatcgcctccagcagcgtatggatgacggcctcgatcgaggagcgcacgaactgggtcggatcgtagacgatctggtacgacacgccttccggcatgttcttcttgatctccgccatcgtcgcgcggacatggtcggagatctccagcgcgttcgaacccggcgcctggaagatcgggatcgcaaccgcctgcttgttgtcgagcagcgagcgcaggccgtattcggatgcgccgagctcgatccgcgcgacgtcgcgcagccggaccacctcgccggccgagccggtcttgaccacaatgtcgccgaactgctcctcggtcgacaaccgtccctcggcgttgaccgagagctgcaggtcaaggcccttgacgctgggcgaggagccgaccacgccggccgcggcctcgacgttctgggcctggatcgcccggaccacgtcgctcgcggtcagcgagtgctctgcggctttctgcggatcgacccagacccgcatcgaatagtcgccggcgccatagagctggacgtcgccgacgccgtcgatccgcgccagccggtccttgacgttgagcaccgcgtagttgcgcagatacgtcatgtcgtagcggttgttcggcgacagcagatgcacgaccatggtgaggtcgggcgagctcttcttggtgatgatgccgagctgacgcaccacggccggcaggcgcggctcggcctgctgcacgcggttctgcaccagctgggtcgccttgtcggggtcggtgccgagccggaacgtcaccgtcagcgtcatcgcgccgtcggtggtcgcctggctcgacatatagagcatgccctcgacgccgttgatctgttcctcgatcggcgttgccaccgtctcggcgatcaccttcggattggcgccgggataggtcgcccgcaccacgaccgacggcggcaccacgtcgggatattccgagatcggcatcgccaccagcgaaatgaggccggcgaggaagatcaggatcgacagcacaccggcgaagatcggccggtcaatgaagaattttgagagattcatggctccgcccccgcgtgcagcgcctagcgctgcacgacgtgctggttggtttcagtggatgcctgctgcatgccgcgcgcgcccatctcggcgacttccgtcttcagaagtgcgccggggcgcacgcgctgcaggccgttgacgacgatgcggtcgccggatttcaggccggcggtgacgatccgcaggccatcgaccgcgccgccgagcgtgacggagcgatagaccgcgcggctgtcgtcgccgaccagcatgacgaatttcttgtcctggtcggtgccgaccgcgcgctcgtcgatcagcaccagcgtctgctgcttgggctggcccatccgcacgcgggcgaactgccccgggatcagccggccgtcgtcgttcttgaacacggcgcggacgcggatcgtgccgctctgcccgttgacctggttgtcgatcagctggatgtgccccttggcgctgaggccgcccgaggtgaccatgtcgaccgggatctgatcaagattgccgcgcttgccggaggcgtccgcgatcgagttcagcgcccgcagcacgacttcctcgtcggcatcgaagctcgcatagatcggattgaccgagaccagcgaggtcagcaccggcgacgaggtgcccgccgcgacgagattgccgaccgtgacctcgatccggccgacccggccgtcgaccggggcgcggacctcggtgtagtcgagattgagctttgcggtctgcagcgcggcttcggcagccttgacgttggcgatcgcctcacgattggcgttgtcgcgctggtcgaaatcgcgcttggtgacgatgttgttgccgaccagctgcgcgccgcgctcgacttcgctggtggtgaacacgacgcgggccttggccgcctcgagctgggcctgggcgcggtcgacctcggcggcgtagggcgcgggatcgatcttgaacaggatgtcgccggacttcaccagcgcgccctcggtgaagttggtcgacaggatcgcgcccgccactcgcggccgcagctggacgcggtcgaccgcctcgagccggcccgagaagtcatcgaacagggtggtcgaccgcggctggatcacggcgacggtgaccggaactgccggttcgggcgcggcggcggtggccgtcgcctgcgcggcatggaaataatggccggtcgcgaccgaaccggcgacggccacggcgccaaggatcacgacgccgccgacgacgcgtcggaaccggccggaacggggattttgggttgacgggggcattcacgcgctccagatatctgtagtgttcgctacaaatgtggagctggacgccggttcgcaagatacttatgtatcaggcactatgaaattattatctcattcatggggaaatgggaagtcgtggaaaaacatccggtgcaacaataggataagctagggacagtccgtcagagaaacggcaccccgcttacggagcaacgaaaaatgggaatgggacgcccccgcgccttcgacgcggacgccgccttggaccgggccatggacgtgttctggcgccacggatacgagggcgcgacgatcgcgcagctcaccgaggcgatgagcatcaatcctccgagcctctatgccgccttcggcagcaaggaaggcctgctcaaggccgcgctcgaccgttacagcgaaaagcgcgacgcctggatggaccgggtggtcagtgccccgaccgcgcacgaggtggccgaacgatttctgatggagcatgcggacgcccagaccgaccccgccaacccgcccggatgtctgctggtccagggcggccttgcctgcggcaccggctcggagaacgttccgttcgaactcgcggcgcgccgcacccgcaccgaggaccagctgcgcgaacgttttgtccgcgccaaggccgacggtgacctcggcgcaagcgtcgatccggtcacgcttgcgcgctatctctccgcggtcacatcgggcatgtgcgtgatggcctcctcgggcgcgaaccgcgagacgctgcgtgagatcgcagcggtgtcgctgaaggcgttcgaggagcagaccaagggctgatcgcagcttcggcgcagccgttgcaaccgccccgcgaagagcggggcgagggaggaagacgtcaccacatcgtctggcgcgcgcgctccggccattcccgatcgtacttctcgccgccgaccgtgtgctcgctcatctcggcaaggatctggcccggcgtcggcaaggccgccggatcgattcgcttgtccggattccagagatcagagcgcacgatcgcgcgggcgcactggaagtagatttcctccacattcatcacgatcaccgtgcgcggcgccttgccttccatcttgaacgaggccagcagctccggctcggccgtgacaaaggcgcggccgttgacgcgcagcgtgctgcccgatcccgggatcaggaacagcagcccgacgcggggatcgcgaacgatgttgcgcagcgaatcgcagcgattgttgccgcggcgatccggcatcatcagcgtcttcgcatcatggatgcggacgaagcccggcaggtcaccgcgcggcgagcaatcgagcccttcggggcccgaggtcgccagcgacacgaacggtgatttctcgatgagcacacgatagagcggcgtcacgtgatcggcgaccttcacggtcgacgcgtcgttcgggaagccgtagatcgcctcaagctgctcgatcgtagagatcaccgacatcagtgctgttctcctttgtggctgctcgtccgttgtcacgcgtcccagcgttcgcccctgatgatgcggacgagctgtcgcgcatgatattcggcggtgccggaattgacgatggtgaagtcgggtgtcgcggtgctctcgtcgacggtgcgggccagccgctgcgcgagcagaccgtcgctgctgcgtgcccgcatcgagagccgggcggccagcacgtccggcggcgccgtgaccagcacgaccgtggcactggcatagtcgcggcgggccgccgcgatcaccgtgcgcgagacgttcgcgatcacagtgcgtccggcgcggatctcgtcgttgatcgcccgcgacagcgcatagcgatggccatgcgcttcccagtgcatggcgtagtcaccggcggccgccgcacgctggaacgcgtccgcgccgatctcctcattgtcttccgacgccgaggcctggcgggtgatcagccggcggggaaacacgatgtcatgatcatcggcgcaggccgccttcgcgaacccaagcagcgtatccttgccggcgccgctcgggccgaccaccaggatcaaccggcccggcccgatcgcagcgcgctgttcggcgatcacggacgcatcggtcacgcgaccctcctcccctcgcgccagacgctgcgcaccaccggcaggtcgcgcgcgacgtgcacgcggatcagatcggcgcgccggccgaccgcgacctcgccgcgatctgacagaccgaccgcttcggccggcgtcttggtcacggtgcgcacggcggaggcaaggtcgatcgccggcacatgccgcggcagttgcaacgccgccatcaacaggctggacgggatgtaatccgacgacaggatatcgagcatgccttcattggcgagatcgaccgccgcgatattgccggagtgcgagccgccgcggaccacgttcggcgcgcccatcaggatgtcgatgccggcggcgtgcaggccccgcgcggcttccatcgtggtcgggaattccgccaccgccaccttgtcgttgacggcatcgaccacgttctcgtcggtggtgtcgtcgtggctcgccagcgggatcctgtactcatgcgccagcgcgacgatcgcgcgggtgttcgcgaccgcatattccttctgataggcgaagcgccgcgcgaacagcacgtcgagctgggcgtcggtcatgccgccgcccttgccgcggtaataatcgcgcaacttgacctcgtcgcggaactggcgctggcccggcgtatgatccatcagcgacatcagccgcacgtccggccggtcgatcagctccttggcctcggcgacgacgtcaggcatcggtacctcgcagcgcagatgcaggaagtgatcggcgcgcagcagatcctcctcgcgtgctgccgagatcgccgccgccagcacgccggcgcggccgtcgacgtcctcggcgccgtcctcgcgccagacccgcagcgaatccagcaccgtggtgatgccggaggttgcgagctgcccgtcataggaaattacggcggcgaccgggttccagaacaccttcggccgcggcacgtagtgcatctcgagatggtcggtgtgcagctcgatcagacccggcatcaggagatcgccgccggcgtcctccgcgcccccgggcgccctgccctcgccgaactcggcgatcttgccgtcaacgatagccacccagccttgctcgaccacgcgatcggcgaggaccagccgggcgttgccgatgatggcgtcttgcttggtggtcatttcaaacggtccttcaggcagcagcagcgaacgaggtcacatcgacgatgcgatcggcaatcagatgacggatttcgtcgtcatggacaatggcgaccatcgcgacgcccctggtctttttttccgcaatcagctcgaccaccactgcgcgattcgccgcatcgagcgaagcggtcggctcgtccagcagcaggatcggcaggtccgagatgaatccgcgtgcaatgttgacgcgctgctgctcgccgccggagaaggtcgacggcggcaaggaccacagccgctccggaatgttgagccggcgcagcagtttgcctgcacgctcgcgggcttcctcgcgcgccacgccgttgacgatcaacggctcggcgacgacgtcgatggtcgccacccgcggcaccgcgcgcaggaactggctgacatagccgatcgtcgagcggcggatgctcagcacctgacgcggctcggcggtcgcaaggtcaacaaccctgccgttgtggcggatgccgatccggccgctgtcgcagcggtaattgccgaagatcatcttcaggatcgaggatttgccggcgcccgacgggcccgacagcaccacgcactcgccgggatcggcgtggaacgagacgccgcgcaccacgggcagctcgacgccgccctgcagatgcatggtgaaggtcttctcggcattggcaagttcgatcatcgcggtcattggcaagctcatggcggcagaatcgaggaaacgagcagctgggtatagggctcgcggggatcgtcgagcacctggtcggtgaggccggtctcgatgacgcggccgcccttcatcaccatcacgcgatgcgacagcaggcgcgcgacggcgaggtcgtgggtcacgacgatggcggcaaggccaagctcgctgaccagattgcgcatcaaatcgagcaggcgcgcctgcaccgagacgtcgaggccgccggtcggctcatccatgaacaccagccgcggctcggtgacgaggttgcgcgcgatttgcagccgctgccgcatgccgccggaataggtcttcggcgcgtcgtcgatgcggccgacatcgatctcgacccgttccagccaggtcgacgcggtgtcgcggattcgaccgtagtggttccagccgaccgccatcagccgctcgccgacattggcgccggccgaaacgcccatgcgcaggccctgcgccgggtcctgatgcacgaagccccagtcggtgcggaacaggaaacgccgctccgcctcgccgagctcggcgagatcgcgcagcacgccgtcgcgcatccggtaggacacccttcctgcgctcggcgcgagctgcgccgagagcaattgcagcaaggtcgacttgcccgaaccggattcaccgacgatcgccagcacctcgccgggatacagcgcgaacgagacgtcgcggcaggccggcagccggccgtaattcttggcaagcccctcggccaccagcagcggctgatcggtgtcgaggctcgaaagctcagacattcgccttctccttgtgcggtgctgcgctctcggtgccgtgatggccggcggcctggcgctgctcgcagaagtcggtatcggagcagacgaacatccggccgcccttgtcgtcggtgacgatctcgtcgagatatgagttatcggcgccgcacagcgcgcagggcgcgttgaagcggtagcgcgtgaacggatggtcctcgaaatccagcgagaccacagtggtgtagggcgggatcgcgtagatgcgcttctcgcggccggcgccgaacagctgcagcgccgcgcaattgtccatcttcggattgtcgaatttcggggtcggcgacgggtccatcacgtagcgcgcattcaccttcaccggataggcgtaggcggtcgcgatatggccgaagcgcgcgatgtcctcgtacagcttgacgtgcatcaacccgtattcggcgagcgcatgcatgcgccgcgtctcggtttcgcgcggctcgaggaaacgcagcggctccgggatcggaacctgatagaccatcacctgcccctcatgcagcgtcgcctcgggaatccggtgccgggtctggatcacggtcgcgtcggcggtcgaggtcgtggtcgcgactccagcggtcttgccgaagaacttgcggatcgagatcgcgttggtggtgtcgtccgagccctggtcgatcaccttcaacacgtcgtcggggccgaggatcgcggccgtcacctgcacgccgccggtgccccagccatagggcatcggcatctcgcggctcgcaaacggcacctgataaccgggaatcgcgatcgccttcaggatcgcacggcggatcatccgcttggtctgctcgtcgagataggcgaaattatacgtcggcgcgttcattccgcggcctcctgcagttcgaccgcctgattggcctcggcgaattcctgccgtagtttgcgcagcaggccgagttcggactggaagtcgacgtaatgcggcagcttgagatgttcgacgaagccggtcgactggacgttgtcggagtgcgacatcacgaattcctcgtcctgtgccggcgccaccgcctcctcgccgagctcgcgcgcacgcagcgcgcgatcgaccagcgccatcgacatggtcttgcgctcgctctgcccgaaggccagcccatagccacgcgtgaagcacggcgcctcggtggtcgaacccttgaactggttgaccatctggcactcggtcagctcgatcgagccgagcggcacggcgaagcccgcatcctcggcaaagaactcgacctcgacctcgccgaagcggatctcgccggcaaagggatggttgcggccgtagccgcgctgcgtcgaatagccgagcgcaagcaggaagccttcgtcgccgcgcgccaggttctgcagccgcaggtcgcgatcggccgggaagctcagcggctcgcgcgtgaggtcgccgaccggcgcgtcgccatctgcctgcggcgacgcttcgatcaaaccatcgcgaccgaggatgtcggtcacccgcggcgtcgctgcctgcgaagcctccgccgtctccggctgctccggcacaaagccttccgcgagctgcggatcgagcagacgatgggtgtagtcgaaggtcggcccgaggatctggccgcccgggacgtccttgaaggtcgaggagatgcgccgccgcacctgcatctcgccggtattgaccggctcggtggcgccgaagcgcggcagcgtggcgcggaaggcgcggaccaggaagatcgcctcgatcatgtcgccgcgtgcctgcttgatcgcgagcgccgcaagctcgcgatcgtagagcgaaccttcggtcatcacgcggtcgacgccgagcgcgagttgctcggagatctgcgccagcgtcacctcgggcacatcgcgatcgccgcgccgctcatgcgcaagcaaccgatgagcgttctcgatggcgcgctcgcctcccttgaccgctacatacatcgctcacactccgcttgcgatcagccgcgtggtgcgcgggatcgcgacaatattgtcgtcatggaccagcacgacatcgatgccgcgcgggaacagggcctcgttgatcgacagccgctggaacaaatcgcgcggcttgatcatcgcctgcagcaccgcgctgccgtcgatgccgggccccttcagctcgaaggccggcccctgcgtcaggctgtcgatctgcaggatcagcgtggtcgagcggtccggatattcgccgctgccgaacgcgaagcactccagtgcgggcaggttcgcggcatctccgatcagcgcaaagcttgcgatcgaagaatcctcgaccaccggcgcgctggcgtgaaacttgagccagcgggcgacatcgggcgttgcggacatcgcagcgtcgagccagatcggcgtatcgtgatcgaacagcgtcagcgcgatcgcggccgcgccgcgcatcagaccggccggcgttccgacgctggcggcgacgcgctgcacgctgcccgggcgcgccatcgcatccatcacggagcggaaggttgattgcgccgacagcaccttgtcggcaaagcctgcgggcatttcggcaatcgtcgtcattgcatcatccctcaccgcgcaccatcgtgtagaaatcgacccgcgtcgccgcggtctcggcagccttgcggctacgctcggcattcatggcggcccgcagcggcgcgatcaccttggcctccacctcgccggacaactccgccgactgcaccatggcgtcgcacagcgcgatcatccgtgccttctcggcatcgcggccgagcgtgtagccgaagccgacctcgccgctcgcaagccgcaccgccgcgcgcgacaccgtcgcctcgccgagattgaacggcgcgccgtcgccgccgacccgcccgcgcatcatcacgaggccgttctcgggctcgcgcaggttctcatgcccgggcaacgtgatcgccgccagccggcctgcgatgtcgctagcggcggagtgcgccagcaccgacatcgcggccttgcgctgcgcctgcttgctgtttggtccggtcgaattggtcgaactcatgcgcaaccttgcttgcatcaagttgtctatgataatagacaacttgatagccgagcgccatgactgtttcgtgacaaaccgaagatttctggtatcaccgcgcgatgagcatgcaggagagttccggcgtcgccttgtggcggcaggtcgccgacggcatcgagcgcggcatcgctgacggccgctttgccgccggtgaaaaactgccgggcgagatggagatcgccgagacttaccgggtcaaccgccacaccgtgcggcgggcgctcgccgcactcgcggagcgcggcctggtgcgcgccgagcgcggcagcggcacctatgtcgaagcccagcgcctcgcttatccgctgcgctcacgcacgcggttttcggagatcgtcggcgccgaaggtcacgaaccgcgcggccagctgatcgaggcaagcagcgacctcgccaaccgcgaactcgcgcgcgacctcggcctgaagaccggcgcgccgctgatccggatcgaggccgtgcgcttcgcggatcggactccgatctgcgtctccaccacctggctgtcggcggagcgatttcccgatgccggcagcgtgttcgccgatgtccgctcgatgaccaagctgctggcgcattatggcgtccgcgattaccggcgctcctcgacaaggatcaccgcggcgatcgccgacgccaccgacgcggcgcggctcgatctgccgctgggacggcccgtgctcgtggtcgattcgaccgacgtcgatctgactgaccagccgctggtgaccaagcgctcgcgcttcgccgccgagcgcgtcgagtttctggtcgagaacggctgacgtagtgtgcttctggctcgccccgctgttgcggggagaggcagaggagacgctacacgacggcgcgctggccgatgatggcaaagcgcagcttgctcgagatgaaatcgatcgcggcgaccgcgatcaggatcatcaggatcaggaacgacaccttctgccattccagcacgcggatctgctcggcgagctgcaggccgatgccgccggcgccgacgatgccgatgatggtggcagaacgggtgttggactcgatgaagtagagcacctgcccggcgatcacaggcaagacctgcggcagcaggccgaagcggatctcgtgcagcgcattgccgccggaggccctgataccctcgacctgcttgcgatccgccgcctcgatcgcctccgagaacagctttccgaacgcgccgaagtccgacaccatgatcgccagcacgccggcgaacgggccgaggccgacgacgttgatccagaccagcgcccagatcagcgtatcgacgccgcggatcgagtcgaggaagcggcgcaccggaaagcggatcaggttcgacgggatgatgttgcgcgccgcgagcaggctgaccggcagcgccagcagcgcggcaagcgtggtaccaagcagcgcgatcgacagcgtctcgccgagcgcctgcatgtagagcgggaacgacgaaccgggattcggcgggatcatcatcatggtgatccagccgagctggctcatccccgcgatcagcctggtcggcgagaagtcgagatcgaccaggccgtagacgaagatcgcgagcgctgccgcgatcatggccggcatcgccagccgcgccgatgcgggccgctcgaacacgccgggatatttggcccgcagctccgcagcgtccggcttcggcatctggctcatcggcgggtctccttaccgaacagccggccgcgcagccagccggtcgagatgtcgatgatgaagacggtgacgatgatggtgacgaggatggcgctgacgtcggaatagtagaacttgcggatcgcgaccacgagctcctgcccgatgccgccggcgccgacgaagcccatcaccgacgcttcgcggacgttgatctcgaaccgcagcagcgcatagctggcgtagcccgccgacacctgcggcaggatggcaaagcgcatgcaggacagccagcttgcgccggtggagcggatgccctctaccggtttcatgtcggcgttctcgacgatctcggcgaacagcttgccgagagccccggtggtgtggatcgcaatcgcgagcacaccggccatcgggccgaggccgaacgcgatcacgaagatcagcgcgaatacgatgcccggcacggtgcgggcgaattccagcagacggcggacgacgaagcgcacccacggtccgggtgaggtattctgggcggcgaagaaattcagcgcgaaagcgagcaccgcgccggtcagcgtgccgacatagctgatcaggatcgtctcgccgagcatcctcagccatttatgccagccccagaaccattcgccgggatcggtccagacccgcgcgccggaatcgagcgtgagaatacgatcgaaatagctgacgaagttgccgaaataggtgaacagcgtgcgcaaattcacttcggcgccgaaggccgcgatgaccagaacgatgcaaaacgccgcggtggccagcgcgcccttcagccgcttgcgcgcgaccgccttgcggtaggcgtcttccagcaccgccaattgctgggctggaagaatggatacggcagtggccatcgttctggtcggtttggctggaggtcaaatgcaacgggccgggttattgaaacccggcccggttcgtttccgggaggcgatcagctcgccttcttgcgcagcctgtcgacgaacttgatcagctcgatcgtgctgtcccaatccttggtcgtagcgggatggaagcccttcttctggccgtcggagagacggtcgaaggcggccttgtccttggtcggcgcgtcgaagaaggccttggcgatcgccgccttcagatcttccggaaggtcggtgttgtaggcgtaggggccgttgatgatcggcgacgacttgttgatgatacggaagtcgtccttcttcattgccgagccgtcggcgttcttcagcatgcccttggtcagcatctgagcgagcgtcgagtcgtcctcgttggtccactggttggccgcgatgtcgacggtgccctgggccagcgccagcacggcgttttcgtggctgccggtgaacacgaccttgccgaagaagccctcggcatcgtggatgcccatcttgtcgagctcgaagcgcggcacgttgttgcccgaggtggaattcggatcgaccaggccgaggttcttgcccttcaggtcttccaccttcttgtaggggctcgaggccttgacgaagaacaccgaatagtagccggtcgaaccgtcggcgttcatgtcgttggcgaaggcgtcggtcttgacgccggtcaggcgggcgcgggcgaacgaggccgagccgtagctggcaatctggatgttgccggaacgctggccttcgatgacggccgcgtagtcattggcgatgcgcagcgtgaccttcacgccgagctccttcgacagatacgcgacgaacggcgtccagcgttcggtgacgcccgaggcgttctcggccggcaccaccgcgaaggtgagctccggatactttgccttccagtcctgcgcggaggccgaaccggcaaaagccagcgcggcagcgccggccagaatgatgcgacgagtgatcatgactacccctgttctgtagttgcacctgttggccgggcaaaatgcccggcctctcggattgaaaatgacgcgacgctcaggccgcggcagcggtgccgagcgccggcgcggtcgcgccgtcgggcgccggcagcggcgccgcgccgatgacgtcattggcctcgaggtcatagagctcgcgggcgatatggtcggtgagcgccgcaggcgctccgtcgaacaccacgcggccggccgccataccgaccagacggtcgcagtaggtgcgcgcgaggtcgagcgagtgcagattgcagagcacggtgatgccgaaatgcttgttgatgcgcagcagcgcatccatcacgatcttggtgttgcgcggatcgagcgaagcgatcggctcatcggcaaggatgatgtcgggctcctgcaccagcgcgcgggcgatggcgacacgctgctgctggccgccggagagctggtcggcgcgctgcgccgcgagctgggcgatgtcgaactgctcgagtgcggacagcgcgagcgccctgtcctgctccggccagacctgcgccagcgagcgccatgacggaatctgggcaagccggcccatcagcacgttggtcagcacgtcgagacggccgaccagattgaattgctggaagatcatcgccgaacgcgcccgccactgccgcagcgccttgccgcgcagcgcggtcacgtcagtgccttcgaacaggatacggccggaggtcggatcggcgagacggttgatcatccgcagcagcgtcgatttgccggcaccggagcggccgatcacgccgacaaagctgcccggcgcaatcgagaaagacgcgttgtcgaccgcggcttttgcgccgaaacggcacgtcaaaccttccaccaccagcatgtaatgctccaaccgcgtcacgttgggccatcgctatccccggcgttttacagttatgtgacggttgcgctgcggtgcggcgatcgttcacacccgtctttgtccaccccttgctgtcaccgcgacgtcatgatgttgtcatcaagcatcccgatgacgagcgcacatctccccggaagccaacgatttgcaagatcagcggaggccctgatggccggaaaaacactctcggttgtgccgaccgtcgacccgactgcgtcggttcgcgagagcaagctcggcaaatataccgaggtcggcgcacgcacgatcctgcttgaagtcagcatggatgactattcctacgtcgtgaacgacagccagatcacctacacgtcgatcggcaagttctgctcgatcgcggcgatgaccaggatcaatcccggcaaccacccgatgcatcgcgcgacccaggcgcatttcacctaccgcgccagcgcctattttcccggagagagcgacgacaccgacttcttcaactggcgacgtgcgcaccacgtgcatatcggccatgacgtctggatcggtcatggcgcgatcgtgctcgctgggcggaacatcggaaccggcgcggtcgtcgctgccggtgcgatcgtcaccaaggacgtgcccgcctatgccatcgtcgccggcaatcccgcgcgtccggtgaagcggcgcttttccgaggatgtcgcggatcgcctcgccgcactcgcatggtgggactgggatcacgagacacttcgtcgtgttctgcccgactttcgcaagctcgcggtcgaggaattcctcgacaagtacgaggccgaagccgtatctcaatcaaaagcaaaacaacggagcgcgacatcgtgacggacattttcatcgagggcgggcgcgcgctggttgacggtgcattcgtagagacctcgctgcgcaccgcgggccgcgacatcggcgcgctcgacaccgaacaggggcgcgccgcgcttcatatcgatgccagcggcctcctggtgctgcccggcatcatcgatctgcacggcgatgcgttcgagcggcagatgatgccgcgcccaagcgtcgacttcccgaccgacgtggcactgatcgacagcgatcggcaggcgatcgccaacggcatcaccaccgtcttccatggcacgacctggtcgtgggagcctggcctgcgcagtgcggaaaatgcgcggaagctgctcgatgcgatcgaggcgctgcggccgcagctcgccgccgacacgcgtttccatctgcgccacgagacccacaatctcgacgccgagaccgagatcattcaatggctcagcgaaggtcggatcgacctgttcgccttcaatgaccacagcaacgtgaagccgaagaagcgcaaccagctggccgaacgggccgggctctcggtcgaggccatcaacgagatgctcgaccaggtggtcgcgcgccgtcccgaagtgccggcctcgatcgcgcggctggccgccgcggcacgcgcggccgatatccgcatgctctctcatgacgacaacactccggtgatgcgtcaggagtttcgcgcgctgggcgccacgatcgccgaattccccgtcaatgaagaaaccgcgcgcgacgccgcggccgccggcgacttcatcgtgttcggcgcgcccaacgtggtgcgcggcggcagccacaccggctggaccaaggcgtccgacatgatcgcacaggggctctgctcggtgctggcgtcggactattactatccggcgcagctgctcgccgccttccgcctcgccgctgacggcatcctgccgctcgccagggcctgggacctgatctcgtcggcaccggcacgcgcggcagggctcgtcgatcgcggcgtgctcgcggcgggccgccgcgccgacatcatcgtcgtcgacgacaaggtgccgctgcggccgcgcatcgtcgcggtgatctcgtccggacggctggtgcatctggccgatgcgagctgcctcgttcattcgatcgcgccgcgcaagaccgttgcggcggcgtagttcggctctgctgtcatgaccactacaccgcgctacgcgatctattacgcgccgtcacccgacagcgccctgcaccgcttcggttcggcactgctcggctatgatgcggtgtcgggcgacgacctgccgtttcccgatggcgtcacgccggactggcgcgaggtgacggaggacccccgcaagtacggcttccacgccacgctgaaggcgccaaccgcgctcgccgacggcagcaatgaggccgcgcttctcgatgcctgtgccgccttcgccggccgcgcgcggcgcattcctgtgatcgaaccggtggtcgatgccatcagcggcttcatcgccgtgattccggcgagccgttccgatgatctgcaacagcttgccgccgactgcgtcaccgcgttcgacccgttccgcgcaccactgacggctgaggatcgcgcgcggcgcaagcccgaacggctcaccgcgcggcaatgcgactatctcgaccgctggggctatccctacgtgatggaggaattccgcttccacatgacgctgacgggacggctgagcgacgagcggcgcggccctatcgtggcgcggctgcgcgagcggttcgccgcagtcgacctctcgacgctcgcgatcgaccgcatcgcgctgttcaagcaggcggagccggcctcacgcttccggatcatcggaagctggctcttgcaggcgagctagtcccgcttcgcgagttcggccagaagccacttcttgaacgtctgcagcgcgcgattgcgctgcgcgccggacggatgaaccagccagtaactgccagtgacgtgaccgaccggcaagagccggcggatggtgccgcgccgttcgctttccgcgatgaacggctcgagcgcgagcgcaacgccggcaccccgctcggcggcctgcagcgcggcgacaaagctgtcgaccgagatcgcgcgcattgccggcggcatcggttcaccggcatgcttgaaccagagcggccaggccgccgggaacgtcgtcacatggatcagcacggcacgcccgaggtcggcggcagtgcgcagcttcaaccgccgcgccagcgccggcgcgccgactggaacggtgctcacatccatcaggcgatgcgcgacgacgccctcgggcttgtcgggcccgaagctgatgccggcatcgaacgtctcggtgtcgaaatcgacgttgcggttcgaggtctcgatcgcgagatcgacctcggaatgccgggtgaggaacgaggatagccgcgggatcagccaggccgacgcgaattgcggcagcaccttcagccgcagccggcgttggccggccgcctcgaccgcggactccgcctgtgccaatgatgcgaacgcgcggccggttgcggccgccagcttctcccctgcgtgggtcggccgaaccacgcggtgggcacggtgaaacagcgcaacgccgagatgggcttcgagattgcggatgcggtggctgatcgccgaggcgctgacattcagcgcgcccgcagcctccttgaagctgccgagcctgaccgcgacatcgaacgcctgcagcgccagcaggtgcgccggccgaaggctcgccgcggcgaggtcgtcccttccccgcgaggctgaccggcgccgcggtcgtggattgttcctgctcatcggccgatcctaacggcgagccgcccccgatgtcgcgcgaaaaatcaggttcggatgaatgccattcatccgaacctggcagctttcgcttgtcgcgcgcggcgcaatgcgaaatcctgtcccacgaaccagaccggcggcaagcccggccaaccgagcgggagaacggcgatgacgacacagctcgcggacgaagcatccatcgtcgatcgcatcctcaaccatatcgacgcgaaatcgaccgatctcagcgacggcgtctggcatgaacccgtcgcgcattatctgtcgcaggatcgcttcgcggccgaaatcgaccacgtgttccgccgcacgctgacaccgttctgcccgtcggccgcgctcgcagagatcggcgcctatgtcgcgcgcgatgcggcgctgacgcctgttgtcgcgatccgcggcgccgacggcgtcgcacgcgccttccgcaatgcatgccggcaccgcggcgtgcagctggtcgacggcgccggctgccgcaaggcgctgacctgccgctaccacggctggacctacggcctcgacggccggctgcgcggcatccccgacgaccatggttttcccgggctcgacaagaccacgcatggtctcgtgcccgtcacctgcatcgagcgcgatggcctggtgttcgtctcgcaggacgatcccgccgcggcgacagatgccagcgacttgccggccttgttcggcgacgactggacactctattcgaccgtcatgcaagaggtcgaggcgaactggaagatcgtcgccgaaggcttcctcgagggctaccatatccgctcgacgcatcaggatacgttctatccgttgcaatacgacaacctcaacgtgatcgaatcgttcggccgcaacagccggatcagcttcccctatcgacgcatcgagaagctgcgcaacgtgccgccgggtgagcgccggacggccggcatgctgacccacgtctatcacctgtttccgaacgtgatgctgtcgaccttcccgaccaaccggttgatgacggtgctcgagccgctcgccgtggaccgcacccggctcgtcacctacacgctgtcgaaccagatcgcggcggacgatggccgcgccgcggtcgcccagggacgcgacttcgtcaccgcgggcgcggccgaggatcgcgagatggcctgcgccgcacagcgcgggctcgcaacgcgggccaacgatcacttcaccttcggcctgttcgaaggtgcgatcaggcactttcatcagaacctggccgcgatcatcgagcgcggcgcaagcgcccgctgatctgcatcaatattgcgcaccgaggaccgagcatgctgaaccacccgaccgtcaaatatcgaaccgagcaggcgatcgcgatcgtgaccatcgatcgctatgacgaggcgcgcaacgcggtcaatccggagaccgcgcaggggctggcgcaggcgttccgcgcgttcgatcgcgatccgtcgctgtcggtcgcgatcctgaccggcgcgggcggcgcgttctgcgccggcttcgacctcaagcgcaccgcgaccggccatcgcggccatcgtgtcgagaacggcgacggcccgatgggcccgacccgcatgaagctgtcgaagccggtgatcgccgcggtcgaggggccggccgtggcgggcggactcgagcttgcgatctggtgcgatctccgcgtcgccgcatccgacgccaccttcggcgtctattgccggcgcttcggcgtgccgctgatggacctcggcaccgtgcgcctgccgcgcctgatcgggcacagccgagcgatggacatgatcctcaccggccgcggcgtctccggcgaggaggccgggcggatcgggctcgtcaaccgcgtggtcgcaccgggcacggcgctcgccgaggcgcgcagcctcgccgacgatctctgccgcctgccgcaggcggcgctacgcagcgaccgactctccgccatcgagcaatgggagctcggctgggaacaggccacgctgaacgaattccgcctcgggcttgcgacggtcgcgaccggcgagaccgaggccggcgcccgccgcttcgcaagcggcaagggccggcacggcgatttcgccgacatcggctgagcagcgcgttactcgtccacccgggtgcgcgcgatgatctcggcggcgcccttctccaggagctccatgccgacggcgcggccgagttcgcgcggccgctcggcgggccctcgtcgcgtcacctcgatgaagccggcgccggcctcatccagcacggcagcacgcagcgtcaactcgctgcccgcgagcgtggcgtggccggcgatcggcgaattgcagtggccgttgagcacccagagcacctcgcgctcggcctcggcggcaagccgcgacggcgcgttgtcgatcgcagcaagccgcgcacgcgtcgcccaatcggtgtcgacgcattcgaccgcgacgatcccctggccgaccgcgggcagcatctcggcgacggagaaatcatgtgcaacgcgcgccgtcatgccgatgcgctcgaggccggagcgcgccatgacaagcgcatccgccggccccacctcgccgccatcgggcagccgctgcttgtcgccgcgatcgagctttgcaacgcgtgtgtcggcggcgccgcgatagtggatcacggtcgcttccggaaacagccggcgcagataggcggcgcggcgcaccgcgttggtgccgatcatgaagcccttgccgcgcgcggcgcggatcgtgtccagcgacaacccgggacgcagcacgaggctgtcgttggcggcatcccgcgccagcatcgccgcgaggacgagccccggcgtctcctcattgcccggcacgtccttcagcgaatgcatcgcggcctgcagcgtgccggcacgcatcgcctcgcgaatctcggcgacgaaggcgccgcccttgccgccgtgtcgcagcagcttgctggtctggtccgcatcgccgcgggtctcgaacttgacgatgtcgacggcaaggtcggccgccgaggcgcgcagcagccgcgcgacctcgtccgtctgcgcgagcgccatcgcactcttgcgcgtcccgatccgcaaaacctgtcccgacacgaaagctccgctgcgtggtcatcaacggctggggattagaacaaaaggccagtcaaaacaatggtttttgcccccgcttggccggctcaggcaatctcctcaacaagcgcgacgccagcctcgcgcatcgcggcggtggcgacggcgagcgaaccgccgagatcgatggcgcggcagccggataacacgaccgtggtctcgaagccgagccgccgcgcatcgagcgccgaatactgcacgcaaaagtccgtcgccagccccgccatcacgacgcgcttcaggccgcgctcgcgcagatagccggcgagcccggtcggcgtggtgcgatcgttttcgaagaacgccgaataggaatcaatcgcggcccggaatcccttgcggatcacgagctcggcccggtcggccgcaagcccgcggtgaagcgcggcgcccgtcgtgccctggatgcaatgatccggccacagcgtctgcggcccatagggcatcgtgatcgaggagaacggcgccgcgcccggatgcgagctcgcgaacgagctgtgagccgccggatgccagtcctgggtcaggacaacatggtcgaaccgctccgcgagccggttgaccaccggcaccacggcatcgccgtccgcgaccgccagcgcgccgcccgggcagaaatcgttctgcacgtcgataatcagcagcaggtcgtcgggcccgatcttcatcaggtgccgatccgcaacgacgcgcgcagcttgcgcaggcaggcgatcaccgagagcgcggtgatgcggccggtcttcggattctccgaggggatgttctcgatcatcatcgagaaccgcgcagaatcagaatcgacctcgatccggtgggtgttgcgcgtcaccgtcgggtcggcccagatctcgacccgtgtgcgatcgggtccgatgccggcgagcgacagcgccaccgcgacgttgagattggccggaaagcccttggcagcgtcgcgtgcgctcccctcgaagatgcgtagcggcgcggtgatgccctcgatccggatgtcgttctcgaccagatgcggcgcgccgagcaggcccgcgactggctttcgtgtcaccagtttcacggaatggatggtcccgatcgccgcggccgtcaccgcatcgagcccgatcagcgcgcccgtcggcacgatgatctggccgccatgcgcgttggcgagatcgacgaggtcgccgttctgcaacagcgcaccgacgctgagcaccactgcggtcttgccgcgctccacaaccggcgccacgatcgagcgaaccaccctgctcggcgcgcactcgaccacgatgtcggcgacatcggccagctcagcgatcggcaccagcttcggcgcggatttgagctccgcaatccagccgcgatgcttgtcggggctgttcgcggagaccgcaaccagcgtcaggccctcgatgccccgatcgagtgccttgacgacatcagtgccgatcgcgccaagaccggcgaccgctacccgcaattttgtcttgttgtcagccatcatttcccgccggcgagcatcttgaccaggcgatagagatactcctggccttcgtagaacgacttgacgagcacgcgctcgtccttgccatgattccggttgtcgtcgacatcggcgccgagcccggaatggccgtaggtcggaattccggcattgcgcaggaacaggccgtcggtggcgccggtgctcatgaccggcacgaccgcagcgtccggccagaactccttcgacagcttctcgatcgatcccatgatctcctcgttcagcggcgacggcgggctcaacgtcgccttgccgcccttcacctcgatccgcttgtcggcgagcgcacgctcgatctgggcctgcacgccctcgaccggctcgccgggcaggatccggcaattcacccccgcggtcgcaagctgcggcagcgcattgatggcgtggccgccatgcagcatggtcgcgacgcaggtggtgcggagctgcgcgttgtagccgggaatctcagacagccgcgccagcgccgccggatccggctgcggcgccagaatggcgcggatgtcgtcggcgttctgcttgctctcggtctcggcggtcttggcgaaatagatccgcgtggtctcgttgagattcatcgggaagtcgtatttcgacagccgaaccaggccttcggcgaggcgatagatcgcgttgtccttgcgcggcagcgatgagtggccgccgcggtccgtgaccgtgagctggtaggcagtggagatcttctcgctggtctgcacgctgttgcggatcgccttgccgttcttcaggccgacgccgccgccttcgttgagcgcgaactcggcatcgatcaggtcgcggtggttcttgatcagccactggatgccgagggcattggtgtcgccgatctcttcatcggtctccagcgcgacgatgatgtcgcggtcgggtttgtagccttccttcttgtagcggatcaaattggtgacgaaggaagcagccatgtatttgtcgtcgctcgagccgcggccgtagaaatagccgtcctgctcggtgagcttgaacggatcgaccgtccagtcctcgcggttggcgggcacgacgtcgatatgggcgaccagcaggatcggcttgcgcgcgccggagccgtgcaggcgtgccaccagattgcctttgtgcggcgcgggcgagaacacctgcacgtcgccctcggggaagcccgccgcgcggagccgcgcgcccatcgcttccgccgccttctgggtatcgccggtcgcggtggtggtgttgatctcgaccagctcctggtagatgccgcgggcaaattgctgctgctcggtcagcccctcggcactggcgccggacgcgagcaggatcagtgcaagcgcggccgcgagccgcagcgatcgaaccatgtctctagccttgtacgacatcgtgctctcccagaattcgaccgcctgattggcgacgaattcagacaggcggcacgcgctttggcaagacgctgagcccttcaatttccgcgcgcatgctccgcagtttcgcgcatcctatttggagtccttatttggcttccttgttagtatccttggccgcgatcacctcgatctcgaccaggaagccgggattggcgagggccgcgacgccgaccaccgagcgtgccggcaggttcggctggctgccgccgaagaactgggtgtagccctccatgaaggccttgaagtccatcggggccgacgcgttgtggaccaggaacacctgcatcttgacgacgtcgcccatgccaaggccctggccttcgagaatgcccttgatgcggttgagcacgccgacggtctgggtcttggtgtcgccataggcctgcgggctcgacgggtcggcgtccttgctgacgaccggcggcacctggccgctgacatagaccgtggtcgtgttgccggtgacggtcacagcctgcgcgatcgggaatgtcgagttgggaatcggatgcctgaccacatcggccgaggcagccgtcgccatcgccgacagtgcggcgcccaacacaataccgatgaatttcatcaaactctccccatgagtggcctggtcagcggcgggcgtcctggacatccttggccgtcaccgcatcctgatagttgttgccgaagtgcgtccgcagataattcacaacagcggcgacctgaccatcggtcatcatgtcgccgaacgccggcatgccgcggcggccgttgacgacgaggtagatcggatagctgccggattcgagagtcttgttgccggcaagcgagggataggtgccggcgccgctcgcgcccatcgcatccggcatgtggcaaccctggcagacattgccgaacagctcctcgccggtcatttcgacgaaacgatagcccgacgagaaggtgcgcttgccggcgccactatcctgtccaagggccgcggttgccgacagcagcgccagcgcggcgatagcagagattcctgtccgcctcatcacgtcttcaccacgcgttcgtgcagtcgggtaatggcgtcgagcgccgacaggatcgcgccctcctgccaggccggcagttgggaggcgtgctcgcccgcgagcgcgatgcggccgtcgatctggcagagattgcgataatgctgcgcccgcccggcttcggtccactccccggcgcagccgagggtaaacggcacccgatgccacgccaccgcgacgccgttctcgaactcgctcttgtattgcggatggatcttggcgccgaattcgaccgcactggcgacccgctcggccggcgtcatcgccgtgaactcgaaggaattggcaccctcataaagataggcgccgagcaggacgccgcggccgccgcggttgaacccatagttcggatagccgatattccggatcggcaggtcggtgtagctgatgccgccatagatcgcctcatcctcttcccagaaccgccgcttgaactgcagcccgaccttcaccgaggcggcgtagggcaaggaatcgatcgcgttcttcatcggcccgctgacatcgagaggcagctggctcaggatcggcagcgggatggtgcagatgcaccagtcggcggtcgcctgctgcaccgcggatggactggcggtgtcgacatagctcacggtgacgcccgagccgttctgctggatctgcgtcaccttggaattgtagcggatgagatcgccgacctcgcgcgcgaacgccttgccgatcatgtccatgccgccgaccggctggaacagcgtcatctggaaatcgtagcgtgcaaaactctgcagatagcgccacatccgcgaccgcaacagctcctggagcgggatcgggtcgctgggcagcggatcgcccatcaagccgccgccgggatcgcgcgcataaccgcggaactcggcggagccgaggttggcattgtacttgtagtcgcgatccagcgcgccccagtcgcgtagcgcctgcagcaggatctcctgatcttccttggtgacgaactcgtcgagcctgccctgctggctgaccttcgccagcagctccgccaccccgccctggaaatcggccttgatgctgcgaaagcgttgcggcttgccgccgaatgcacgcgtcgcgtgcatataggcgttgtggttgagctggatgaagggttccagcgtcacgttgagccggcggcaatagtcgaggagcgcgcggtgatgatagggaatccgccatgggccgggattgagatacagcccctgctcgaactggcaggtctgcttgaggccgccgagctcggtaaagctgtcgccgccgcggatcgaccagttgcggccgccggcgcgattgttgaattcgaggatctggaccttgtagccggccttgcgcagctccagcgccgccgtcatgccggcaagcccggcgccgaggatcagcaccgaagcgcccttgacgtcgcccgcgagcttgagcggccccttgtaggcagactcggatgcgaagccgaggctcgtcatcgcgtgatacatcgccgaactgccggcgatggtcccgatcagcgccagcaaatcccgccgcctgatcacagattcgttctgcacccgtgttcacccagccactgacgccgatgccgaagggaaacggttgacgcgacccatgtcaagaaagggcgcacgcttccacacgcacccacacgcgcttttgatgcatcacgcgaccgctccatcacaccacacgctcgagatgcacacgccggcagtccatttcgaaatcgagcccgaccaccggcggacagtcgaaatgccaggtcaagccgttgcgcagcacgccacggcggccgagctcgatttcgagcacgggatagacgtcatgcacggtgtagagctgcaccgcggtggtgtcccgccaggagccaccgaacgcgctcatccgccgttccatctcaccgagcacgaacttcgccttggccgagatgccggcggggctggtgtcgccgggcgccacggtatgatcgcggtaattggccttgccctcgacagactcgccgctgccggccacgacaaaactcgtctgcgcgtcctttgcggccggcaccgtgtagcagaaggcatggaaagacggctcgccgggcggatcgagtttcggacagacattgctccgcgccaccggattgacaccgtcccgcatcacgccccaggcgatcaacgtctcgatgtagatctcgttgaaggccttgaacccgtcctcggtgaacggcgccggcgagcgcagttcacaggccccgaacgccgtcagcggacggcctgcggccttgatgatgtcggcaatccgctcgaacccggcgctcagcggcaccggcccggaaaacctgacccgctcgatggtaaagccgggcagcgcgccgatgccgcaggaatactgactgacgccgggcatgaagcggtagtcgccgtccggggtgtcgatggtgctggtcatggtgcctcgcgatgtggagtgatgcggccgttacgatgacgtcgcgggatgcaagatacatacgaacggcccgatttcatcacagccgtcgtcctggcgaaagccaggacccataaccacagcattcggtgatgaacgggacagtggccactgcgcgcgcaacaatgtgcaattggggtaatgggtcatggctttcgccaggacgacgatgagatcgttctcgattcaagatgtcgaagatcggtgttatcgccgcgaaggcgaagatgggtgacgcagccgcggctctctccggccgg

SEQ ID NO: 14 - DNA, 167428 bp, Bradyrhizobium enterica
cttgccgcagccgcaaggaccacgccccggagaaccttgccgtcatccgcaagctcgccatcaacgccctgcaagccacgccaggtccagcgcgcttgtaagggaagcacaggcgaaagggctccctgcccccttgcgggggagggctggggagaggggtgccgcttgctccgctggtaagaacaggccggccgtgcgccacaatgattaacgcgctacctcgcctttcccagcttgcctgcaccctgcgaccgaaggccgcccttggtctcgatgaagctgatgatgcggtcgagaccgtcgctcttcttcagattggtcatcacgaagggccgctcgccgcgcatccttctggcgtcggtgtccatcttctcaagcgacgcaccgacatggggcgcaaggtcgatcttgttgatcaccaggaggtcggatcgcgtgatgccgggaccgcccttggaggggatcttgtcgccggcggcgacgtcgatgacatagatcgtgagatccgccaattcgggcgagaaggtcgccgccagattgtcaccgccggattcgatcaggaccagatcgaggtcggggaattttgcgcgcatgtcggcgaccgcggcgagattcatcgatgcgtcctcgcggatcgcagtgtgcgggcagccgccggtttcgacgccggcaatgcggtctggcgtcagcgagccggagcgcaccagaaattcggcatcccatttggtgtagatgtcgttggtgatcgcggcgatgtcgtagcgctcgcgcatcgacttgcagagcaggtccatcagcgcggtcttgccggagccgaccggaccgccgacgccgacgcggagtgggccgtgagaactgggcatatcaatccatccatcatcgtcccggcgaaggccgggacccattaccaccgaattcaattgctgcgcgaagctggggccacagcactgcataaccacaagcctcggtggttatgggtcccggccttcgccgggacgacggctggggagagctgcgcatcatgacctaaacagcctcgtatactgcgtctcgtggcgcaggctggcgaggtcggcccgaaaggtcgcgctgccgagatcgtcgagcgcggctgcatcggcccgcgctgcggtcgcggcgacgaccggctcgagatccgccagcacgcgctgactgtcggtctgcccgagcgggatcagccggctgcctgccgagatccagttcgacaccacggcatgcaggaaagcatgcagcgacggcgccagccgaatgccgtgcgccgcgctgacgatgccgaccgcaaccgggtagacgatcggcccgtcgcaggccgcgaccatcgcgtcgagaccggacgaattccaggcggcacgggcgatctcgatgaaggcgcgcccctgtgtcgtggtctcgagctgccgctcgcgcgacggcacgaaggccgcggcgagctcggcgatctctttcagcccggcgcagtcttgctccgccgccgcgcgaaagctttgcgcgagaaacacggcgtcgcaaaatccgctgccgtcgctgagcatcgcggcgagccagtcgcgcagcgaggcggcgtcagtgatgtcgccggcctcgaccgcccattcgatgccgctggaataggcgaacgcccccaccggaaaagacggcgacagccacgtcagcagccggtacagcgcggccgcctcgtcatccgcgatcccgccgcgcatcgcggcgggatcgggctcatttgtggtcatgagcatgggagtggtcgtggtgatgatgagcgtgctcgcaatgctcatcatgatggtggtcgtggtcgtgcccgtgatcatgatcatggtggtgaccatggtcatgcgcatggctgtgggcatgatcgtgcccggtgtgaccatgcgcgtgcgcgtcggcgtgcgcatgctcggcataggcgccgccctcgggatcgaacggcgcctcgatctcgatgacgcgggcccctaaccccttcaccatcgcctcgatgacgtgatcgcgccggatgcgcaggcccttcggcatgatctgcgtcggcagatggcggttgccgagatgccaggcgacccggatcaggtgatgcggatcgctgccgcggatttccgcgagcggctcgggagccgcgaccacctcgaccaggcggccgtcctccagcaccagcgcatcgccgccgcgcaacgcgacggcgttttcgaggtcgagcaggaattcgagcccgcgcgtcccggtcatcgccatccgccgccggtgccggtcgtcgaaatcgagcacgacggtgtcggccgccgcttccttgaagcgatgctgtcccaggaccttggttgcgcggatcatcgaacccttcatgccgatacgttagagcttctgaaccttggcgtcgctgatgatctcgatcaccgtcgggccggtcttcatgtcggcggaatattcgcgccacaccttcatgtgcggcgccttgctgtgtgcggtcaggtcgtcgcgggtttcccagcgctccaccaccacatacagattgggatcgttgacgctgacatggccctcataggagaggcagcccttctccttgtgggtctcggcgatgcacgccttgtgcccccgaatgaagtcgtccttgttttccggcttcatcggggtagtcgcgatgacatagatcatgatgttgctccgttgttgtttttattaccggacgtcgactttctcgggcgtgatcacctcgattttcggcggcgcagccatgcacttcacggcgacccggccgaacgtcttcatgtgctcggcggtgcgatgcggcaccagcgcgtcggcgttctcccactgctcgacaaacaccaacttgctgtggtcggtgacgctctcgtgcaggtcgtaggcgatgttgccgggctccttgcgggtttccttgatgcaggccgtcgccgcggcgatgaattcggcgcgggtctcgggcttgatggtcagcgtagcaacgacgtaaatcacggaaattcctcccggtttcttttctaggtaagttaccgggggtggttttagaacataaaatagcgctgtgccatgggcagcacctcagcaggcgcgcaggtcagcagctcgccgtctgcgcgtacctcataggtctccggatcgacctcgatctcgggcgtcgcgtcgttgtggatcatgctcttcttggagattttcccacgggtgttctgcaccgcgtagagcttcttgctgatgccgagcttgcgggcgaggccgccggtgaccgcggccttcgaggtgaacaccaccgaggaggcggtcagcgacttgccgaacgcggcgaacatcggctggtaatgcaccggctgcggcgtcgggatcgaggcattgggatcgcccatcggagctgccacgatcgagccggccttgatgatgcagtccggcttgacgccgaagaacgccggcgaccacagcacgaggtcggccatcttgcccttctcgaccgagccgatcagcttcgacacgccatgcgcgatcgcggggttgatggtgtacttggcgatgtagcgcttgacgcggaaattgtcgttgtcgttgcccttgtcctgcggcagcgcgccgcgctgcttcttcatcttgtcggcggtctgccaggtgcggatgatgacctcgcccaagcggcccatcgcctgcgagtccgacgacatcatcgagagcgcgccgagatcgtgcaggatgtcttcggcggcaatggtctccttgcggatccggctctcggcaaaggcgaggtcttcggcgatcgacgggtcgagatggtggcacaccatcagcatgtccaaatgctcgtcgatggtgttgcgggtgaacggccgggtcggattggtcgatgacggcagcacgttcttcaggccggcaatcttgatgatgtcgggcgcgtggccgcccccggcgccttcggtatggaaggcgtggatggtgcggcccttgaaggccttcacggtgtcctcgacgaagccggactcgttcaacgtgtccgaatgcagcatcacctggacgtcatagtcgtcggcaaccgacaggcaggtgtcgatcgccgacggcgtggtgccccaatcctcgtgcagcttcagcgcgcaggcgccgcccttgatcatctcgaccagcgccgccggacgcgacgcattgccctttccggagatgccgagattgaccggaaaggcgtcgaacgactggatcatccgccccatgtgccacgggccgggcgtgcaggtggtggcgaaggtgccgtgcgacggaccggtgccgccgcccagcatcgaggtgacgcccgccatcagcgcgtgctcgatctgctgcgggcagatgaaatggatgtggctgtcgaatccacccgcggtaaggatcttgccctcgcccgcgatcacgtcggtgccggggccgatcacgatggtgacgttgggctggatgtcgggattgccggccttgccgatcgccgcgatcatgccctccttgatcgcgacgtcggccttgacgatgccccagtgatcgacgatcagcgcattggtgatgacggtgtcggccgcgccctgcgcattggtcacctgcgactgccccatgccgtcgcggatcaccttgccgccgccgaacttcacctcctcgccataggtggtgaggtccttctcgacctcgatgatcagatcggtgtcggcgagccgcaccttgtcgccggtggtggggccgaacatgtcggcatagacggaacgcttgatcttcacggacatgtcagccccgtttgtgtttgaattgttgaccggcggtcacaacgagcgcctcgcccttcgcaccacgtcgtcgaacttcgtatcaagccagggattgccgccacgacagcccgcgaccacttgctcggcccaagcggtgtagtcgaccagatcgtcgcgctcctccgtcgtcggatcagagtgaatacgcgcgccgatattgctgatcttgtcggcaatcttgatcagcttggcgtcggccgacttcttgggcgcgtcgacgacttgcagccgccgccgctcggcctttggcaggctcatgtcatcggtgcattcgatgacgaggagggccacgcgatcagagaacctcgccgagagctcttcgcgtgtggtgtcggtgtcctccatcgtatcgtgcagccagccggccgcaacgagttcggcatccgcaccatcggtcgcgatcgcaagcaggttcgcgacctcggcgagatggttgatgtagggctcgttgccccgtcccttccgcgccatgccgttgtgccggcgtgcggcaagatcggcagcttcggagatgaggcggattgcaggaagcatggttacaaagctcccctctgatcgcaaccgcagttggcgtgagaacgagaagcgacttcgattggcgcccggggcttacccctctccccaaccctcccccgcaaggggggagggagcctgagcagcgtgctcacctcacctgacaccaaggcaacctcgcacgtcacagcttccccttcacctcggcacgaaacccgtagatcacgcgcttgccggcgagggcgacgagttggacgtcgcgggtctggccgggttcgaagcggacggcggtgccggcggcgatgtcgaggcgcatgccgcgggccttcttgcggtcgaatttcagcgccggattggtctcgaagaaatgatagtgcgagccgacctggatcgggcggtcgccgctgttggcgaccgacagcgtcacggtcttgcggccggcattgagctcgatctcgccgtccttgatgaagagttcgccggggatcatgtcgcgctcctatcggatcggctcgtggacggtgacgagcttggtgccgtcggggaaggtcgcctcgacctggatgtcgtggatcatctccggaatgccggtcatcacctggtcgcgggtcagcaccttggcgccggcctgcatcagctcggcgacggtgcggccgtcgcgcgcgccctcgacgatgaaatcggtgatcagcgcgatcgcctcgggatggttcagcttgacgccgcgctcgagccggcggcgcgccaccatggccgccatcgaaaccagcagcttgtccttttcgcggggagacaaattcatgcgagcactctgcaagcgttgaaaggatgagttgagccacaggcctttagttaagccagagtcttggcagcgggacgatggaggcgcggccgagcaccgccatcatgtcggcgcgcaaccgggccgcatcttgggcacagaagcgcgccattgcaaagccattccaggccgagatgccgacttcacctccgaagctttccgacgcctcgcggatgcgctcgaccagcgcctcgtcgcccggcacgatcagcgccgtgccgatcgcgcagccgccgcctgcaatcgcgggccttgccagcttctcgccgatctcgccgtcgagcctgacggtctcggcaaacgcaagccggccgccacggcgcatccgccagcggtcgacgaattcaccatggcgcatgatctcgcccatcgcagcgcggccgaacaccacgatctcgcagagcaggagcgaggccccctcggcaaggtcgatgtcgaagctcctgacgatgcgcgcgcggtcgaacaggatagtctcctgcggcagccaggagagatgcgcgccgtccgcgacgctgagcgagatatcaagctgggcagcggcgccgggcgcgcgatagaccttctcagcggctgccgtggtcagcgtcaagcgtgcgccctcgccggccgagatgccaatctcgaagcggtctccgccggcgataccgccggccgtattgacgaacatggccgagaggccgtcgtcctccggcgacgggaagcggacgcgcagcgagcccgactcatgcaggtcgccccgccgggtcgcgccgtccttgcgatgcacgccgaaccgcactgcgccctgggcgcggtttgccgcaaacgtcgccgccgccgcgcctgcgatcccgctccgcattcccccgacgctccctcacgcgcgccatgaaaggcggcgtcacattgtcttcacagcgccatctggcggctgatctcggcgggatcgaggcttgcgcggtcgcaggcatatttcaccgcaccccggtccatcacggcaaaactgtcgccgagttcgcaggcaaagtcgagatattgttcgaccagcacgatggcgatgttgccgaggttgcgcagataggagatggcgcggccgatatccttgatgatcgagggctggatgccctcggtcggctcgtcgagcagcaggagttttggccgcatcaccagcgcgcggccgattgcgagctgctgctgctggccgccggagaggtcgccgccgcggcggcccagcatggtctgcagcaccggaaacagcgagaacacgtcatcggggatgttgcggtcctcgcgcttcagcgggccgaagccggtcttcagattctcttccaccgtcagcagcgggaagatctcgcggccctgcggcacgaagccgatgccgcgccgcgcccgctcataaggcttcagcgcggtgatgtccttgccgtcgaaattgatcgcgcctgacgcgatcggatactgcccgaccatggcgcgcagcagcgaggtcttgccgacgccgttgcggccgagcacgcaggtgaccttgcccggctcggcggtcagcgagacgccgcgcagcgcctgcgccgcgccgtaatagagattgatgttgtcgaccttcagcatcgcctagcgccccagatacacttcgaccacccgctcgttcgacgacacctggtcgatcgagccttcggcgagcaccgtgccctcgtgcaggcaggtcaccttgacgccgagctcgcggacgaaggtcatgtcgtgctcgaccaccatgatggtgtggttcttgttgatctccttgagaagctcagcggtcagatgggtctcgacatcggtcatgccggcgaccggctcgtcgaccagcagcaccttggggtcctgcgccagcagcatgccgatctcgagccactgcttctggccgtgcgacaggctgccggcgaggcggttgcgcgcatcggtcaggcggatggtctcgagcaccttgtcgatccgctcggcttcggccttgctgccgcgccagaacagcgtgccgcgcaccgaatgatcgacattgagcgcgagcagcagattgtcctgcacggtctggctctcgaacaccgtcggtttctggaatttgcgcccgatgccgagctcggcgatgcgagtttcgtcgagccgggtcaaatcgacgatgccgtcgaacagcacggtgccctggtccggcttggtcttgccggtgatgatgtccatcatcgtggtcttgccggcgccgttcgggccgatgatggcgcgcatctcgcccggcgcgagcgtcagcgacagattgttgatggcgtggaagccgtcgaacgagacatgcacgccgtcgagatagagcatggccgaggtggcgcgggtatccatcacgttcatctgcctactccgccgggttcggcgcgccgacgccgtcttcgcgcgcagcgctgtcggcgtcgggagagccgttccttgactttgtcgtctcccaccaggaattgatcgtgccgacgatgcccttcggcaacagcagcgtcaccaggatgaacagtgcgcccagcatgaacagccagtatggcgcgagcggccccgaggtgaagaacgtcttggcgtagttgaccacaacggcgccgagcgcggcaccgatcaacgtgccgcggccgccgaccgcgacccagattaccgcctcgatcgaattgcccggcgcgaactcgctcggattgatgatgccgacctgcggcacatagagcgcgccggcgacgccggccatgcaggccgacagcgtgaacacgaacagcttgtaggattcgacgcgatagccgaggaagcgcgtgcggctttcggcgtcgcgcaccgcgatcagcaccttgccgagcttcgaggtcacgatcgcgcgacagatcaggaacgcgacgatcagcgccaggcagctcagcaggaacagcgcggcccgcgttccttcggcctgcacgttgaagccgaggatgtccttgaagtcggtcaggccgttgttgccgccgaagccgaaatcgttgcggaagaacgccagcagcagcgcataggtcatcgcctgggtgatgatcgacagatagacgccggtgacccgcgagcggaaggcgagccagccgaagcagaaggcgagcaggcccggcaccaacagcaccatcagcgccgcgaaggcgaacttgtcgaagccgtaccagtaccacggcagtttgtcccagttcaggaacaccatgaagtcaggcaggatcgggttgccgtagacgccgcggctgccgatctgccgcatcagatacatgcccatcgcatagccgccgagcgcgaagaatgcgccgtgaccaagcgagagaatcccgcaatagccccagatcagatcgatcgagagcgcgaggatggcgtagcagacatatttgccccacagcgccaccagataggtcggcacctggaacatcgagccctgcggcagcagcaggttcgacagcgggatcagcacgccgaccgcggcgacgatcagcacgaaggcgatcgcggcgcggtcgagcgaacgcgtcaggatgtgcggcgtcatgcttccaccgcccggcccttgagcgcgaacaggccgcgcggccgcttctggatgaacaggatgatcagcaccaggatcgcgatcttgccgagcaccgcgcccgccaccggctcgaggaacttgttggcgatgccgagcgtgaaggcgccgaccagcgtgccccagagattgccgacgccgccgaacaccacgaccatgaatgaatcgatgatgtagctctggcctagattcgggctgacattgtcgatctgcgacagcgccacgccggcgatgccggcaattcccgagccgaggccgaaggtcagcgcgtcgacccgcgaggtggcgatccccatcgaggccgccatgcggcggttctgcgtcaccgcgcgcatctcgaggccgagcgcggtgtagcgcagcatcgcgagcaggatcgcgaacaccgcgagcgtgaagcagaggatccagagccggttataggtgatggtgatctggccgagctcgaaggcgccgctcatccaggagggattgccgacctcgcggttggtcgggccgaacgcggtgcgcaccgcctgctgcagcaccagcgacaggccccaggtcgcgagcagcgtctccagcgggcggccgtagaggaagcggatgatggtgcgctcgatcagcacgccgatgaagcccgcgaccaggaacgcgagcggcaccgcgatcagcagcgagtaatcgaacagcgcgggataacgggtgcggatcacctcctgcaccacgaaggtggtgtaggccccgagcatcaccatctcgccatgcgccatgttgatgacgcccatcacgccgaaggtgatggcaagcccgatcgccgcgagcagcagcaccgagccgagcgacaggccgtaccaggcattctgcaccatcgaccacatcgccagattgctctggatcgaggacaccgcgcccgccgccgccttggcgaccggcggcggctgatcgccaagcccggtgagcagcgccagcgcctcctggtcgccgcgcgccttgaccacggcaaccgcatcgagcttgtcgctgtcggatgcatccgacttgaacaggacgatggcggcgcgcgcctcggcgaaggcctgcttgatcggcttgacgctctccttggcgagcgcgctctcgaccgtcggcagcagattctcttcgtggctcttgaacaccgactgcgccgcggcgaggcgcttggccggatccggcgacagcagcgtcaggccgccgagcgcggcctccacggtgcggcgcaggcggttgttgagccgcacggctgcggcgttgtcgggcagcttgtcgacggcagcgcccgtggtggcgtcgacgatcttgccgtcggcctgcgtgatgaagaccttcttgctgtccggatcggccgacagccggccgtcctgcagcgcgctgataatgggcgacgccaacgcattgcccgatgcggcgatctcgccgaccgcggcttcagtgtcggagaactcgtcatttgcgaatttggcgaccgaatcctcgaacgggccggccagcgccggcacagcaaggcagctcagcagcaggatccagagacaaagcgtacgaaaacgatcaatacaaatggcaaacacgtcaggaccccggcaggagtgggaggagaaggcggcgagcgacgccgccttctccaatgttggaaggttgtgttgtgtcgttaggtcagcagcgctcgattacgagccctggccgccgcacttgttggtcttggtgttgtaattgccgcacttcttgccgacccagtcgccgatcaggtccttggagccctcgagttccttcgaccaggcgtcgccggccaccaggcccggggtcttccagaccacgtcgaactggccgttgcccttgatctcgccgatgaacaccggcttggtgatgtggtggttcggcagcatcttcgaggtgccgccagtcaggttcggcgcctcggtgccgggaagcgcgtcgatcaccttgtccggatcggtcgacttcaccttctcgaccgccttcacccacatgttgaagccgatgtagtgcgcttccatcggatcgttggtcacgcgcttcggattcttggtgtaggcctgccactccttgatgaacttctcgttcgccggggtcttgatcgactcgaagtagttccaggcggcgagatggccgagcagcggcttggtgtcgatgccggcgagctcttcttcgccgaccgagaacgcgaccaccgggatgtcggtcgccttgatgccctggttaccgagctccttgtagaacggaacgttggcgtcgccgttgatggtcgagaccaccgcggtcttcttgccggccgaaccgaacttcttgatgtcggccacgatcgtctgccagtcggagtgaccgaacggcgtgtagttgatcatgatgtcgtcctgggcgacgcccttcgacttcagataggcttccaggatcttgttggtggtgcgcggatagacgtagtcggtgccggccagcacccagcgcttcaccttctcttccttcatcagataatcgacggcggggattgcctgctggttcggcgccgcgcccgtgtagaacacgttgcgctcggactcctcgccctcatactgcaccgggtagaacaggatgttgttcagctccttgaacaccggcagcacggacttgcgcgacaccgaggtccagcagccgaacacgaccgcaaccttgtccttggtgatcagctcgcgggccttttcggcgaacagaggccagttcgatgcggggtcgaccacgacgggctcgagcttcttgccgagcacgccgcccttcttgttctgctcgtcgatcaggaaaaggatggtgtccttcagcgtggtttcgctgatcgccatggtgcccgacagcgagtgaaggataccaaccttgatggtgtcgtcggccgcttgcgcgggcgcgaagggcgaggacgctgccaggcccaaaaccaggccggccgtcgccgcgagtgcgcggcggcgggtcatcgtcgctattccttgagtaagctgagtaagcatgaaatgtcgtctccctgacgcaggcgtgaacgcttgcgaaacggccgcatggccgcctgcggttaagggaatcgcaagaactgtgccacggtgcgtgggcaccgtaagccgatgaaccaactggataatttcatgagttccgggaaaatacggagaatgactgcttaaacattgagccgataaattggctgccgaaagagcaatcaggttattttgtaggcaaaattgcccttatggctaaatttccggcatcgatttgtgacagattgcgcgatggttcggcgcacgttgagagcagttcccggcgatatcatcttgaaaccgcccagttcctggtccatatcctcgccatgcccgcgacatcgcggtgccttcgcgagctgcgtgttcttatgccgccccaagcggcttctggctcgcctttcagctaacccagcttgacgccccagacacgcgggtgtccccgaatgccttcatgcgattccaggcgattttgcccgggacgatgacggcttttatggaaagaaccaccttttgacctcctttcaggatttcggcctcgccgatcccatcgcccgcgcgctccgagaagaaaattatctgacgccgacccccatccaggcccagaccatcccgctcgcacttgccggccgcgacgtggtcggcatcgcccagaccggaaccggcaagacggcatccttcgcgctgccgatcctgcaccgactgctggagaaccgcgtccgcccgcagcccaagagctgccgggtgctggtgctctcgccgacccgcgaactgtccgggcagatcctcgacagcttcaacacctatggccgccacatccggctgtcctcgacgctcgccatcggcggcgtgccgatgggccgccaggtgcgctccttgatgcagggtgtcgaggtgctggtcgccacccccggccgcctgctcgatcttgtgcagagcaacggcctgaagctcaaccaggtcgagttcctggtgctcgatgaggccgaccgcatgctcgacatgggcttcatcaacgacatccggaagatcgtcgccaagctgccgatccggcgccagacgctgttcttctcggccaccatgcctaaggacatcgccgaactcgccgaagcgatgctgcgcgaccccgcccgcgtggcggtgacgccggtggcctcgacggtggatcggatcgcccagcgcgcgatccaggtcgatttcgcggctaagcctgcggttctcgcccagctcctgaagaaggaaccggtcaatcgcgccctggtcttcacccgcaccaagcacggtgccgacaaggtggtgaagagccttgccaaggccggcatcgaggccaacgcgatccacggcaacaaatcgcagaaccaccgcgagcgcacgctggcagcgttccgttccggcgagatccgcacgctggtggcgaccgatatcgccgcccgcggcatcgacgtcgacggcgtcagccacgtcgtgaacttcgacctgcccaacatcccggaaacctacgtccaccgcatcggccgcaccgcgcgcgccggcgcggacggggtcgcgatctcgctgatcgccggcgccgaggagatgggctatctgcgcgatatcgagcgcctgatccggattaccgtgccgcgggaagaccgccgcacgcagggtggccgcgaggcggctgcaccggcccaggcgccccacccgcatcggggcggccgctctgcgccccgcgcgcataatgtccgtgggaatgaggctgctccgggtgcaaaaggccctcgccgccgccgccgtccgggtggtaataaaggcgcgccgcagacgagccggggcgagtcgccgcgtccgtcgcaggccggcaacagcgaaggcatccagggcgtcgccttcttgcatcgcgagagccggccgaatccgcaacacaaccgcaacaaccgaccgaagcactagccgtcgctcgatctggagaaccatatggctaaggaagagctgatccagttcgaaggactggtgaccgaaatcctccccgacgctcgctaccgggtgcaactcgatgccggacacgagatcgtcgcctacaccgccggcaagatgaagaaaaaccgcatcaagacgctggccggcgaccgcgtcacgatcgaaatgtcgccctacgatctggaaaagggccgcctgatcttccgccacaaggacgaacgtccgagcggcgcgcccggcggcccgccgcggggcggggcccagcgcggcggccagttccgccgccgataaggcaggcatgcaaccgttgcgcgcatgatattctgacgtcttgcgcaacaattggccggcggtcgcgccggccaaaaaaagcgcgcacgtcaggattgttttgaagccctctatcgaataatatcctgcccatcgattttcggccggacgacattagccaataccggtacagccggttcagacgctgacgacccttccaaaaattcgatctcaccaccccgccgatcagcgggtcttgaacttgtatatctgagaagggactacccacgtgagcatgggaaccgtgaagtggtttaacgcgaccaagggctacggcttcatccagccggatgaaggcgggaacgacgtgttcgtgcacatcagtgcagtcgagcgcgccggccttggcactctgcgtgaaggccagaagatctcctacgagatcgttgctgaccgccgttccggcaaatcctcggccgacaatctgcgcgccgccggataagccgatttcccgggagcgcgaagctccaggaaattgtcgttaaagcatcaagggccgcaccttcgggggcggccctttttgtctggatcgctggtccgccgccgtgacccaaagcatgagtcgcaaactgcgcggcggatttccgaaagagatcgtggttgcgctctaaagcgcgatgagattgggttgagctggaacggcatcaaaagatcacctctcccttgggagaggtgaagcaagaccgcgccaggccgattcagctaaaactcatcccgctttaataggtcgagcaggtcgtcggcatggtcgcggacgtcggggcatagaacacgcaaatcgattgccgcggccgcgtaaaggcgacgtcgctgagattgatgccgctcttggccatcacatagccgatcgccggaacgtatctgtagctcacctcactgaatatcagataggtgcccgcaaccagcagcgccggcggaacgatgcttgtcacgatgtcaccctggctgcggctcgaggccgtcaccgtggcctgcgtcgcacccgaggcgatcgtcccggacttgctccactggatgtgcgcgatgttcgaattatcgacgtagatttccgacagcgtgaccttggtcggcgacgcgtcgtaaggcgtcatgatgccgacgctggcactgaagaaattctgcaggtcggcatccaccacctgcgtcgcctgcgaggtcagatccgacgcggctcgtgccatcagcgtgaccttgcggtcgaccgcgacaccggatgaaaactcgacggtgccgaggaacatcacgagcatcaacggcaacacgaaggcgaactcgaccgcggcgagacccctgcggtcacggccgagagcggcaaccgagcgcagcagggccgcaggcaggcatttcatgactttgctcatgagcaggtggtccccgcggtaccggacggttcgttcttgaacgtcgcggtcgcggtcaagagccgcttgccattggcgaggttggcggtgttgaagccaagcttggtgacgaacagcggccattggtagaacaggcggaccaccacgacgtcgccgtccttgccggggcaccatttcatggtcggaacgaatgcattggcgccgtcgatcggaggcgtaatgttgacgctgctgaagccggtcgcagccggatagctgcgtacgtcgacatagatgccattggtgcagtcgaacagcgtgctgacccggccgcagacgaagtccttgaactgctgctgggtatagcttgcgccctgagcctgtccggtcatgatgaagcgggcggaatcctgcgtcaccgtctcgagcacctggctggcaaagaagatcatcgccacttcgatgatcgcaaaaagcagcgcgaagaacagcggcgccaccatcgcgaattcgacggcagttgcaccacggtggtttcggcgaaagcgacggaggaggcgcgcataagaatgagcgggtggtggcatcaacgaccccagatcaacatgacgaccacaactacccaagactcattgtcgaactatttcgccggatcgcgacagatcgacccgatccgttagaccttcattaaccatatcggtggcttgtcggtgaaaggcttgggatcggcacgcggcctccggcgtgtgatgcgccggagcgagcgcgcgctagttctgcggcttcgcggtacctgatccggtggcctggctattgaggaaaccggcctggtccatggtcgccttgaaataggtctcgccgtcgccgagcgtgatgcggcgctggcagaccggcatgcagctataggtctcgcgatcgatgccgcgatagaccgtaacaagctggtcggtcggaccctcgacctggatctggcgatccaccagcacctggccggtgcggtcgagtgcgatgaaattggtcgcgccgtagcccttgccggtcacgacaacgaccccgccattctgtaaggtgacgtcggcgatcaggggattgccgaccacgatcgtggcgataccgccgggcagcttgacgagcttggcctggtcgacattgaccgcaatccgatccggatccggcgcagccgatgcaggcgcgagccccagcagcatggctgcggccagcgagatgaagccaatgcgcgtgacggcgcgaatacgttgggactgaaacgacatactctaccccgggacgttaacaagccggcaaaggcgatacgcagcggaccggcgcccgacgcgggcaaatctgacggcaattcatttaagaagagcaaaaatcgaccgccgaattgcgcggatgtcacaacttccggagccgagctgcgcagcgtccgccatcccgcgcgggaacgccccgccatcgggctccatagtccgcggttatagcaatcttaagagtctccaagccatctctgccagccacaacctcagggcgtgtcacgtgtcttccgtatcacgaatcgaaaagcgcgccgccggttccgccgcgcgcggcctgattgtcgaccctgcccggattcgcgacgctgcggcgcgctggctgatgttcagtgacttcggcgacgctgcgcagcgccgcatggcgatcgcatggtcctgcatcttcgcatgcatccttgccgacgcgatctggctgccgaactccgggctttcgtttgcgtcgtcgaattggatcacgatcctgcaaggcattgtattttgcgcgatagcggccgcattcattgcgattgcctccaaccgccttgccgccgaccagcgacgcccggccgtcctgttgcggcgcggcctgttgatgaccgagctgttctggcgcgcgctgctgccgatcagcgcgctgctgaccgcggggagcacgctcagctatctgatcgcagcatcgacgctgccgcttggagacgaccttctggcaggcttcgatcatctgctggggttcgactggccgacgttcctggccgcgacgaactcgaacgcgttcgtcgcgacgctgctgacgaccgcctatcaaagcaccggcctgctgtcgcaagtggttcttggctggctgatcctgcaacggcgcggcgacaggctcgcggaattcatcgccgttctcagcctcagcgcagtcgcgctgtgcatcggcatgtcgctgatccttgcggccggcgcgttcgcctatttccatcccgccgcggacagttacgagcactttgcggcacgcggcgaaatgtggacgttcgggcaaaccttttcgatgctgcgcgacggatcgctctcggtcatcgacatgtcgaaggtcgacggcatcgtcagctttccctcgttccacacgatgctcggcgtcatgacgatctatgctgcgcgtgacacgcgttggctcgtcatcccggtattcgttgtgaatgcgacgatgatcgtcgcgacgatgcccgtgggtggccatcacctcgccgacgtcctggctggcggtggcttgaccattgccgccatcctcgtggctcgctgctctgccaggccgtccgtcagcaagacttgagccgccgcaatcggagctctgggcttacgcggccgcgatggcttcaattcgcggcgcggacatgaacgaccacacggtcgtcggcgtagaggcgctgccatccttcgatgtgatccagcagcttcgacgccggcgtggtcgggtcgagcatcaccgcatcgatctcatggctctcgagcaggccgaggaaaccgttgacgtccttgagctgaaccgcgcgggccatggccatcccgaacgtctcgccgtagagctcggcgcgcccgtcgatgaacaccggcatctggcgccagatcaggtaaccgccgaactgcagatcgttgagcacgcgcttgacgttgtgcgccttcatggcgtcaacggcggcagcccgctcataaacgggtggcggcgagatgatctgacgtgccgcggcgacggaggtccacgcggcaagcccggcgatcaggatcgcagccggaacggccctcaggcgaacggcgctcacggcacgcaactcaaactgggttgcgaccggcgtgagcacggcaagcggcagcagcagcgcgaacagctcgagatttctgacatgggacagcgccatgtgcagcaaacccagtaccaggacgattcgcggtgccggcaacctcgctccgtaatggagtgcggcgccgagcaggccgaggatggacagcgcgaacggatcgatctcgctgaaagtcgccggcctccattcctggatgagatgcagcaattcgccgaggccgagaatcctcagcgaggcgaggatcgaaccccatccatagggggtcacacagcacgcagccaacgcgccgatgccgaacgctccccagcgcagcgccagcgccaatctttgagccggcaaggcattccaaagcgcatcgagcgcgaatgcgccggccagcaccaggccaaacagaaagccgccgtgcaggttggcccacagcgcgatcagcggcagcagccagaacgagggcgcctcacggcgctcgctggcggtcatcaggccgtccgcccagaccagcatgatgggcatcgccagcacatgcggacgggccagcagatgcccgcaggtcagcaccagcgccgcaagggcgatcatgctcgcgtggatcgtcggcagcgcgcggttgaggatggcggtcagcagcgcgaagctggcggcggcgcaggccgcggccagcgctgccgggccggtccacccggcgaggtcataggccttcgccaacaggacctgtgccagccacgacgacgacgcccacggcgcaccggccttggtgaacgaatagatgtcgaccgacggcagcgtgcgatggtcgaggatccagcggccgacggcaatctgccagtaggtgtcggaatcggccagcagcctgtcgccaacgagcagcagcagcgcatagacgccgcacgccatccagaaccaggccgggacgccggcgaacagggaggctttggtccgtgggagggtcgcggcctcgagactcatggtgacaccggccgggctacggcgtcattgccggaacggataggccagctgcccgccgatctcggacggtacgccctgcccggcatcgacgccgtaatcttccggaagcttgccttcgggcatccggaacgttccgaacagaatgtcccagagtggaaacgtgcccgcgaaattggtgtcgccgccgtcctcgagcccggtgtgatgccagcggtgaaacaccggcgtcgcgatcacatatttgaacgggccgagcgtccagttcagattggcgtgcacgaatgccgagtggaaagtggtgaacggcccgacccacagcatgatgttcggcgagatgcccgccatcagcaggatcacatcgacggtgatcgtgccgaccagaagattgaccggatggaagcgcgccgccgagatccattccagatcctcggaagagtgatgaatggcgtggtacttccagaaatcgccgcggtggaacatccggtgcagccagtacagcatgaaatcggagccgaccaggaagatgatggactgcagccagagcggaagctgcgccagcgggccatgcccgttctcgtagaacgcgatcagatcgtcggcgccgtgaacgttgaacaccacggccgcgcccaccaccaagagcccgatgcgcagcacgcgggcaaacaccggcacgaagaaccaatagcagatgtcggtgaccagctcacgcttctgccaccatggcttgccgggattgcaggcccagaaatgggcgagcaccgtaaagcacagcgccagcgcgatggtgatcggcaccaccttcatcatcgtctggccgatcatctcgatgacttcaaagggaaagctgggcatgaacggcctcattcgacggatgccccatgggtacagatgtgcacttaaggagccgtgaacaggtgcccatagcggtcctcagcacaaagctgcaatttgagcaggccgcttaattccaaatttactctgcgcaacaagtgcgggttcccgctgtgtttgttcaatcaaattaactgcgccgcaattgtcgaaccgtagggtgccgcaatggtcacggtgctgagaacgccggcgagaccaaacctagttcgaccagccacgtgtacacaggagttatttatgaagaacctcgtttcgcgcttcgtgaaggacgaatcgggcgcgaccgccatcgaatacggcctgattgccaccggtatcgcgatcgcgatcatcgctgcggtcaacggcgtcggcaagaacctctcgggcactttcagcacgatcgccggttcgctgaagtaagccggttccgacgaactcgcatcaaaggtcccggcacccccggggcctttgctatttgtcggtggccgctcggcggcctccgttgcggtcgccggcggtcctttcccgattgttcaccattggccgctagcgtccgctctcgaccgcagctccagcttgacggcatgactccatgatcctcgacatcgcacgcttgatgctgtttccggccctgatggcctttgcggcggcgagcgatctcttcaccatgacgatcccgaaccggatctcgctggcgctggtggccggcttcttcgtcctggcgcccctgaccgggatgggcgtccatgaaatcctcaaccatgccggcgcgggcgcgctggtcctggtggtggcgttcggcatgttcgcgatgggctgggtcggcggcggagacgccaaggtggtggccgcggccgccctttggttcgggtttgagcatctgctcccctatctggtgcttgcttcgctgttcggcggcgcgctgaccgtcctgttgctgcagctccggcaatggccgctaccctatccgctggcgtcccaggcctggctcagccgcctgcacgacaagcagaccggcattccctacggcatcgcgctcgccctcggcgccctgttgatctatccggagaccgactggatcaagacgatcgatctcgcgcacttcgccatgcgctgagaaagcagcggtaaccgcccgttaaggcgatttagatacgcctcattaaccatgctttgacgaatagctggtcaactcccatcacggcggcggcagcgtcgcggcgtcatgtggaaagtgaagcgtaatggataaggcccgcattctggtcctggctatcgcaggctgcgccggcctcacggcgctctatttggcgagcggcagcgacgacaagccggcgccgcctccgccggtcgcccagctgcctaccgtcgacatcctggtcgcgagaaccgacatcggccttggccaggccgtgaagcctgaagatctgcagtggcagacctggccggcggcgaccgccagcgccagcttcatgcgcagggacagcaacgccgaagcgatcaaggacgtcaccggctcgatcgcgcgcgccccgttcatccagggcgagccgattcgcgagcagaagctcgtcaaggccgacggaagcggcttcatggctgcgatcctgccgaccggcatgcgggcggtctcaaccgagatctcgcccgagaccggcgccggcggcttcatcctgccgaacgaccgggtcgacgtcctgctgtcgaagcgcgacaagaatccggaccgcaacggcgccgacatcgtcaactccgaggtgattctgaccaatatccgcgtgctcgcgatcgaccaggcgccgaaggaaaaggacggcaccaacgcactgatcggcaagacggtgacgctggagctgaagcccgaacagaccgaaacgctggcgcgcgcgcgccagagcggcgtcctgtcgctggcactgcgcagcatcgccgacaacaacgcgcccgaagtccggaccgacgacaaccaccagaagcgcggtgagacgatcaacgtcatccgcttcggcgttgccaaccaggcaacgatgcagaagtgaccatgaggatacaggtgatgaagggcggggcaactcaacggacgatgcgggccttcatggtccgcgcattgtcgttctcggccgtcacggcgctctcgctcaacccggcgctgacgccggtgacggcgagcgattaccgcgccgcgcccgcccctgccgcatcgaccgacggcggccagatgaatgcccgcttcctctcgctcggcatcggcaaatcgatcgtgatcgatctgccgagggacatcaaggacgtactggtggccgatcccaagatcgccaatgcggtggtccgctcggcgcagcgcgcctacatcatcggcgcgacggtcggccagaccaacatcgtgttcttcgatgccgccggtcagcagatcgcggcctatgacatcgcggtcaagcgcgacctcaatggcgtacgtcaggcgctgcgggcggcgctgccgaattccgatatccagatcgagggcgtcggcgacggcgtgatgctgaccgggagtgcggcgagcccgatcgacgcgcagcaggccggcgagatcgccgcgcggctggtcagcggcgccgagaaggtcgtgaactccatcgcggttcgcggccgcgaccaggtgatgctgaaagtcacggtcgccgaagtctcgcgcagcctgatcaagcagctcggcatcgacctcaccgcgaacctcaactacggcacggccgtagtgaaattcaacaacgccaacccgttcacggcgaacaacgcaccgctggtgcccaacaacgccatcaccacatcgttcggatcgtcggtgtcggcaaccatccgcgccatggaaagcgccggcgtggtgcgaacgctcgccgagccgaacctgaccgcgatctccggcgaatcggcgacctttatttccggtggcgagtttccgatcccgaccggcgtgacctgtcagacgacgacgggaggcgcgatcggacagtgcgttcagaccgtcagcttcaagaagttcggcatttcgctcaacttcacgccggtggtgctgaccgagggccggatcagcctgcgtgtgatgaccgaagtgtcggaagtctcgaccgagaactcgttgaccggcggcgccggtggaacgacgatcccgtcgatcaagacccgccgcgccgagaccacgctggagattccgtcgggcggctcgatggcaatggccggcctgatccaggaccagaccaagcaggcgatcaacggccttcccggcctcgggtcgctgcccgtgctcggcacgctgttccgcagccgcgacttcgtcaacaaccagaccgaaatgatggtgctggtgacgccctatgtggttcgcgcggtggcgcagaaggatctcgcgcgtccggatgacggcttcgccaacgcgtccgatccgcaggccgacctgctcggcagcatcaatcgcgtctacggcgtgcctggccgcaccgagccggcgcggaattaccgcggcacctacggctttattaccgactgaggcggacgatgacacagacgacacccagaacatccgccgatcccaggcgcgccgtcagtctcgccggcgcactcgtcggcctcgccatgacgctcggcgcctgccagcacgccgccgacaacagtttcgcgatggtgaacgcgccggccgattatcgccagcgtcacccgatcgcggtcaccgaggctgatcgctcgatcgtggtctttgtcggccgcagccgcggcggcctgaccgcggagcagcgcgccgaagtgatgggaatggcgcaggactggattcgcgagggcaccggcgccgtcaccatcgacgttcctgccgacacgccgaacgcacggaccgcgcaggaatcgctgcgcgagatccaggcgacctttaccgccgccggcgtgccgccgcgcggaatcctcgtgcggaaataccatcccgaggatccgcggcagatgcccgcgatccgcgtgaactacccgaagatgaaagcggtcgccggtccgtgcggtctctggccggaggatctcggcccgtcgatccacaacgggtcctatatcgagaacaagcagtattacaatttcggctgcgccaatcagcgcaacctcgcagccatgatcgaagacccgaccgacctcgtccagccgcgcgcggagacccctgcctacacggcgcgtcgcaacatcgcgttcgacaaatatcgcaagggcaccagcactgccacgacgtatcccgaggccgacagggccaagctaagcgacacaggaaaatgatcacctacgcgcagcaaaactccgaagagcagacggacgccccgccgcaggccgtggacgaccatattgctccggcgccccgggtttcggttcaggcgttctgcgaaacggtcgagaccgccgcagccgtgcagtcggcaggcgaggaccgccggctcgccaaggcccacctcaagatccagatgggcggcatggcggccgccatcgaggcctatcgctcggcgccgacgcccaacgtcatcatcctcgagaccgagggccgcagcgatatcctggccggcctcgaccagctcgccacggtgtgcgatgccggcacaagggtggtcgtgatcggccgggtcaacgacgtcacgctgtaccgcgagctggtgcgccgcggcgtcagcgactacgtgattgcgccggcgcatgcgatcgacgtggtgcgcgcggtctgcaacctgttctccgcgccggaagccaaggcggtcggacgcgtcgtcgccgtcgtcggcgccaagggcggcgtcggcgcctcgacgatcgcgcacaatgtcgcctgggcgatcgcccgcgatctggcgctcgattcggtggtcgccgatctcgaccttgcgttcggcaccgccggcctcaactacaaccaggatccggcgcagggcatcgcggatgccgtcttctccccggaccgcgtcgataccgccttcgtcgaccgcctgctgtcgaaatgcaccgaccatctgagcctgctggcggcgccggccacgctcgacaaggtctacgatttcggcgccgaagcgttcgatgcgatcttcgatacgctgcgcaccacgatgccctgcatcgtgctcgacgtgccgcatcaatggtccggctggaccaagcgcgcgctgatcgcggccgacgacatcctgatcgtggcggcgccagacctcgccaatctgcgcaacgccaagaacatgttcgacctgctgaaggcgtcccggcccaatgaccgcgcgccgctgtactgcctgaaccaggtcggcgtgccgaagcgtccggagatcgcggcgggcgaattcgccaaggcgatcgaaagccagccgatcgccgccatcccgttcgatccgcagattttcggttcggccgccaacaacggccagatgatcgcggaaatctccgccaatcaccgcgcagtcgagatgtttctacagatggcgcagcggctgacaggccgcggcgaaaccaagaagccgagggggtccttcctgtcgcccctgctcgaaaagctgcggtccaaatagtggtccgcgtggagtcaagacgtcgtgtttggtaagcgtagcggaaacgatggggacgtgcgggcacccaagcccgcttttcaggcgccggaacccgccggctcgtcgccgatgtcgcgcgagtccgccgccccgacggtatcgtcgccgccgctggctccggccaagccgccgcctgctcccaccgtcgaagcgcgccgctcggacaattattaccaggtcaaggcgacgatcttcggcgccctgatcgaggcgatcgacctcgcccagctcgccaagctggacagcgagtcggcgcgcgaggaaatccgcgacatcgtcaacgagatcatcgcgatcaagaacatcgtgatgtcgatcgccgagcaggaagagctgctcgacgacatctgcaacgacgtgctcggctacgggccgctcgagccgttgctgtcgcgcgacgacatcgccgacatcatggtcaacggcgcgggcaccgtgttcatcgaagtcgccggcaagatccagcgcaccggcatccgctttcgcgacaaccagcagcttctcaacatctgccagcgcatcgtcagccaggtcggccggcgcgtcgacgaatcctcgccgatctgcgacgctcgcctcgccgacggctcgcgcgtcaacgccatcgtgccgccgctggcgatcgacgggcccgcgctcaccatccgcaaattcaagaaggacaagctgacgctggagcagctcgtcaagttcggcgcgatcacgccggaaggcgcgaccatcctgcagatcatcggccgcgtccgctgcaacgtgatcatctcgggcggcaccggctccggcaagaccacgctgctgaactgcctgaccaactatatcgagcacgacgagcgcatcatcacctgcgaagacgccgccgaactccagctgcagcagccgcatgtggtgcggctggaaacccggccgccgaacatcgagggcgagggccaggtcaccatgcgcgagctggtccgcaactgcctgcgtatgcgccccgagcgcatcatcgtcggcgaagtccgcggccccgaagcgttcgacctgttgcaggcgatgaacaccggccacgacggctcgatgggcacgctgcacgccaacaatccgcgcgaagcgctgtcgcgctgcgaatccatgatcaccatgggcggcttttcgcttccctcacgcaccatccgcgagatgatctgcgcctcggtcgatatcatcgtgcaggccgcgcgcctgcgcgacggctcacgccgcatcacccacatcaccgaggtgatgggcatggaaggcgacaccatcatcacccaggacatcttcctctacgacgtggtcggcgaagacgccaacggcaagatcatcggcaagcaccgctcgaccggcatcggccggccgcgcttctgggagcgtgcccgctactacaatgaagagaagcggcttgcggcggcgttggatgcctccgactcgccggcgccggcctaggggagcgcaggatgcagacgcaaacgctcgctctggcgttcctcgccgccaccaccgtgggcggcatcgcctgggtcttcctgtacccgtacctctcgggggaaaagaaggccgaatcacgccgcgcatcggtggcgcgcagcgaaccgtcgacggcacgaagcagcgagcgcacgcagcgctcccgccgcgaacaggtcgagggatcgctgaaggagctcgaggcgcggcgccagaaggacaagaaagtctcgctcggcatccgcatctcgcaggccgggctcgagtggtcggagcaaaagttctgggtgatctccggcgccctcggcctgttcgggttcgtcgttgcattcctgatcggcggaggcttgctgggtgcggccggcatcggcttcgccatgggtctcggcctgccgcgctggctgctcggcttcctgaagaagcggcgggaaaaggccttcctgaaggcgctgcccgacgccgtcgacgtcatcgtgcgcggcatcaaggccggcctgccgctgttcgaatcgctcaaggcggtcgtcaacgacgcgccggagccgctgcgcagcgagttcctcgcgatcatcgagacccaggcgatcggcatgccgctcggcgaggcctgctcccggctctacgaacgcatgccgctgccggaggcgaacttcttcggcatcgtgatctcgatccagcagaagtccggcggcaatctgtcggaagcgctcggcaacctgtcgcgggtgctgcgtgaccgcaagaagatggccgagaagatccaggcgatgtcgatggaagcgaaagcctccgccgccatcatcggctcgttgccgccgatcgtgatgatcctcgtgttcctgacgacacccgactacatcgccctgctgtggaccaactcgctgggccagctcatgctggttggttgcgcgctctggatgacatgcggcgtgctggtgatgaagaagatgatcaacttcgatttctgacggtgcagcatgattgatattctgatcgccaagctccacgacgtcaggttcatgaccatgctgcttgccttcttcgcggcaagcgcgacggtctataccctggtgatgccgctgctcgccggcggcgacctcaacaagcgcatgaaggccgtcgccagcgagcgcgaacgcctccggcaacgcgaacgcgaacgcctcgccaagacggagaaggtggcgctgcggcagacgccgaagcaggtcgtctcgagggtggtggacgacctcaacctgacgaaatggctcgcccaggaagcggcgctcgagaagctcgtgatggcgggctatcgcggccacgccccctacgtcaccttcctgttcgcccgcgccgtgacgccgatcgtgatgctgatcggcgccatcatctacacgttcttcatcgccggcgcggcctggtcgcttacgatcaagatcggcatctgcgtcgtcgcggcctatgccggcctgcaggcgccgatgctgttcctgaagaacgcgatctccaagcgccagctccagatcaagcgcgccttcccggattcgctcgacctgctgctgatctgcatcgagtcgggcatgtcggtcgaggtcgcgttccgcaaggtggccaacgagatcgtcggacaatcggtcgcgctgtcggaggagttcgcgctgacgaccgcggaactgtcctacctgcaggaccgcaagtccgcctacgagaatctggcccgccgcaccggcctcgaaggcgtgaagtcggtctgcatggccctgcagcaatccgaacgctacggcacgccgctcggccagagcctccgcgtgatggcgcaggagaaccgcgacatgcgcatgaacgaggccgagaagaaggcggcagcgctgccgcccaagctgaccgtgccgatgatcctgttcttcctgccctgcctgttcatcgtgatcctcgggccgtcctacatcaagatcgccacgatgcactgagctgcgcagcggcggctttcgaaaacgcccggcaatgccgggcgtttgcttttgtgtgcgtgaagttggaagcgtcgcagagcccggagatcaatcgtccctggcgacgaccggcgcggtgggtgcggcgcgcgatgcggtccgcggcccgtccttgcggttcagcatgtcacggagataggcgacgttggctgccgcttcatccgccggcaggtcggccttgacgatggtttccgcctccgcgaagcggccctgcaggccgaccaccagcgcaaggttctgccggatgcgggtgtcggcgcgggcgctggcataggcctggcggagcgtctcttccgccttcggcaattccttggtcagcatgtaggacaggccgagattggacagcaccgacggctcgtccggagccagtcgcagcgcgctcgcataatagcgccgcgcttcctcgtgccggttcagcttgtcgagcgtggtgccctgcaccgacaggatccgccaatccggattgtcagggctgtgcgcgcggctcagcacgtcgaacgcggcctgcgaattgccgttgtcggccagcgcgcggccataagcggcgagcagcgccttgttgccggggttggcgatcgtcgcctgctccagcacggcgcaggcctgcgaacgctgtccggttgcgcgcaaggcctggccgtaggcgattgcggcctcggcatccttggcattcttgcggtagcgctcgccataaacctcgacagcacggcgcggatcgtcgggcgcaggatcggaccgggacgcgatcgatccggtgacatccgacatggtctggcaaccgccaagtcctgcggccaaaagcgccacgagggctgcggaagcgagatgcggggtcaaattggactgtcgacgcatggcactgtgactcacgaaatcgggcgaatggatccaactgagcgtgccagcaatagactgttaaccctaacgtctggttaactggcatggtcagcgatcggcacgccgggttccagtcgcagctcgcgtcggccacggcgcgcgctaccatccgccgcgaaagccgtgttagtcaccagcaacgacgccagaacagccgagagtcgcatgccatccgtgttcgagaccgcacccacgaccgccgtcacgccgatcaccttcgtcaccaaggcgacatgggatgcgatccgcagcgcgttgccggcgccggcgcgccagttcgccgaggccaacggcttcgaagccaaaccgggcaaatcgctcgccctgccggcggctgacggcggcatcgcagaggtgctgttcggcctcgaggatgccgacgccaaggcgcgcgatccgttccggcccggcgcactgcccggcctgctgccgccgggcgtctaccgcttcggcaatgcgccgcatgacacacggcttgccgcgctcgccttcgcgctcggctgctaccgtttcggccgctatcgcaagaacaaggcgcccgaggtccgcctcgtgccgcctgacggcatcgacgccgccgagatcgcgcggatcgcggatgccgcggcgttggcgcgcgacctcatcaacacgccgtccaacgacatgggaccggccgagctcgccgaggcggcgcgcgacctcgcagccaggttcggggccgccttcaactgcatcgacggcgaggagcttgcgcagaacttcccgctgatccacgccgtcggcatggcgtcgacgcgcgcgccgcttctgatcgatctcagctggggcgatccggcccatccaaaggtgacgctggtcggcaagggcgtctgcttcgacaccggcgggctcgatctcaagccgtcgagcggcatgctgatcatgaagaaggacatgggcggcgccgccaacgtgctggcgctcgcccagatggtgatggacgcgaagctgaaggtgcggctgcgggtcctgatcccggcggtcgagaacgcggttgccggcaatgcgttccgcccgctcgacatcttcaagtcgcgcaagggcatcaccgtcgagatcggcaacaccgacgccgaaggacggctggtgctcgccgacgcgctggcgctggccgacgaggagacgccggatctcctggtcgatctcggcacgctgaccggcgcggcgcgcgtggcgctgggcccggatttgccgccgttctacaccaatgacgaggcgctcgccggcgacatcgcagcctgcgcgaagagcgagaacgatccgttgtggcggatgccgctatggccggcctacgatgcctggctcgactccaagaccgccgacatcaccaacgcgccgtcaggcggcttcgcgggctcgatcacctgcgcgctgttcctgcagcgtttcgtcgagcacgccaggagctggctgcatgtcgacatctacggctggacgccatccgcaaagcccggccgccccgaaggcggcgagtgccaggccgcacgtgcgatctacaaactgctgagccagcgctatgcatgatccgcgcctcactcccgcccgcgacgacgtcgccgcgaaatatctcgagggaaaggtcaaggctgcgcgctttgtcgaaggcgagaccttcgaggtggttgacgccatcgcgccgctgcggcgggcgccggcggccgatgccgaacagatgacccaggcgctgaaaggcgagcgcgtcacggtgtatgatcgcaacggcgaaggctgggcctggggccagctcgccgatgacggctatgtcggctggattgccgaggctgcgctgacgacgcccggcgcagcaccgacgcacaaggtgactgcgctgcgcacgctggcgtttccgggaccgtcgatcaagctgccgccggccgaggcgctggcgatggggaccaagcttgcgatcctccgcgaggacggagctttcgccgtgacacgcgaaggctggcacctgccacgccggcatctcgtaccgctcgacgcgatggcgccagatttcgtcgccatcgccgagcaattcgtcggcacgccctatctctggggcggcaagtccggtctcggcatcgactgctccggcctggtgcagatcgccttgaccgccgccggcaccggctgcccgcgcgacagcgacatgcagcaggacgggctcggccgcgaattgacggctgcggaggcgaagcacctgcagcgcggtgacctgatcttctggaagggccatgtcgccatcgtgcgcgacgcgacgacgatcgtacacgccaatgcgcatcacatggcgacggtcctagaaaacacgcacgctgcgatcgcgcggatcaaggcggcgggaagcgaggtcgccgcgatcaagcggctttgatttcgtcattccggggcggcgcggagcgccgaacccggaatccattcatccaccgaatatgcggcccgatggattccgggctcgcgcttcgcgcgccccggaacgacacgggaagctacgtcgccaccgacccatcgcccgccgcctcgatccggaacgccgccgcgaacagcgcgcgggtgtagtcgctcttcgggttcttgaacagctcggaggccggcccctcctcctcgaccttgccggatttcatcacgatcagatggctcgcgagcgaggcgaccacgcgcagatcgtgcgagatgaacatgtaggtgaggtcgcgcttgcgctgcaggtcgcgcagcagatcgaccatctgggcctgcagcaacatgtcgagcgcactggtcggctcgtccagcacgacgaagttcggctccagcacgaccgcgcgcgcgatcgagatgcgctggcgctggccgccggagaattcgtgcggatagcggaagcgccagtcgggatcgaggccgacatccttcagagccttgatcacccgcacctcgcgctcctcgcgcgacagctgcttctggtgcacctcgagcccctcggcgatgatatcagcaatcgacatgcgcgggctgagcgagccgaaggggtcctggaacacgatctgcatgtcgcggcggaacggccgcatctgcttgaagcgcaggccctggatgtccttgccaaggaacacgatcgggccatcggacgaaatcagcctgagcagcgcgagcccgagcgtggtcttgccggagccggactcgccgaccacaccgagcgtctcgcccttgcgcaccgcgaggctgacgccatcgacggccttgatgtggccgacggtcgagcgcaacagcccgcgcttgatcggaaaccagaccttgagattgtccgccgacatcacgaccggcgcgccgggttgcggcggcgccggatcgggcttcggctcggccgccagcagcgccttggtataggcgtgctgcggcgcggtgaagacttgctcgaccgggccctgctcgacgatcttgccgttgttcatcacgcagaccgtgtcggcgatgcggcggacgatgccgagatcgtgggtgatgaacagtaggctcatgccgagccgggcgcggatctcggccagtagcgccaggatttgcgcctgcacggtgacgtcgagcgcggtggtcggctcgtccgctatcaacaaatcgggctcgttccagcgtccgcgcccgggccgccgcaccaccgatgccccgatgcagcgacaggatctcgccgatctgggtctcgatggtctgcagcggattgagcgaggtcatcggctcctggaagatgatcgagatgtcgttgccgcggacctcgcgcatctcctggtcggacgcggtcaagagatcgcggccgcggaaacggatcgcaccggaaggatgcgaggccgtcggatacggcaacagcttcaataccgacagcgcgctgacggattttcccgaaccggattcgccgaccagtgcgacgcactcgccgcgcttgatcgagaacgagatgccgtcgaccgcaaccgaacggccgaaggcgaccgagaggtcgcggacatcgagcaaaggctggttggtcgcgtccatgcgtcagcccttcgagaacgtcttgcgcggatcgaaggcgtcgcgcgcggcttcgccgatgaagatcaggagcgacaacatgatcgcgaccgagaagaagccggtgaggccgagccacggcgcctgcacattggccttgccctgcgacagcaattcaccgagcgagggcgagccgggcggcaggccgaagccgaggaaatccagcgccgtcagcgtcatcaccgaggacgagacgatgaagggcaggaacgtcatggtcgcgaccatcgcgttcggcaagagatggcggaacatgatcacgccgttggagacgccgagcgcgcgcgccgcctggatgtattcgaaattgcggccgcgcaggaattcggcgcgcacgaggcccaccagcgaaacccatgagaacagcaggaggatgccgagcaggatgaagaagcccggcggcagcaccgccgaaatgatcagcagcagatagagcgagggaatcgcggtccagatctcgatcagccgctggaagatcagatcggtccagccgccgaaatagccctgcacgccgccggcggcgatgccgatgatcgacgacaggatggtcagcgtcagaccgaacagcaccgagatgcggaagccgtagatcagccgcgcgaccacgtcacggccctgatcgtcggtgccgagccagttgtattcgaggtcgcggcagccggtgaggcccttcttctgcaccacgtccttgcattcggcctcggtcagcatccaggtcggcttcgacggcgccggcgtcggcagatccagattgtgggtatcgtaggaatatcggatcggcggccagatcatgctgccgcccttggcggcgatctgtttctgcaaatagggatcgcgatagtcggcggcggtctcgaaatcaccgccgaaggtggtctcggcatagctcgccaccaccggccagtagagatggccgtcatacttgacgagcagcggcttgtcgttggcaatgaaattggcgaacagcgaaaccacgaacaggacaaggaagatccagaacgaccaataaccgcggcggttcgccttgaagttctgccagcgccgctggttgagcggcgacggcgcgaaggcgtggcgggtggcaggcaccgcctcgcccagcggcgattgcgtcgtggtctcgaccggctggggcgcgagcatcgtcatcagacctcccgcgcctcgaagtcgatccgtggatcgatccacatataggcgagatcggagatcagattgaccaccagtccgaccagcgaaaagatgaacagcgttccgaacaccaccgggtaatcgcggttcaacacgctctcgaagccgagcaggccgagcccgtcgagcgagaagatggtttcgatcagcagcgaaccggagaagaaggcgtggatgaacgcgccggggaagcccgcgatcacgatcagcatcgcattgcggaagatgtggccgtacagcacctggtgctcactgcagcccttggcacgcgcggtcatcacgtattgcttgcggatctcgtcgagaaacgagttcttggtcagcagcgtcatggtagcgaacgcgccgagcgccatcgacaccagcggcagggccagatgccagaaatagtcgatgatcttccagtaccagggaaattgcgcccagccgtccgaagtcaggccgcgcagcgggaagatgttgaagaacgagccgccggcgaacaggatgattagcaggatcgcgaacaggaagccggggatcgcgaagcccacgatgatcacggccgaggtccaggtgtcgaaccgagacccgtccttgaccgccttgcgaatgccgagcgggatcgagatcagataggtcagcagcgtcatccagatgccgagcgacatcgagaccggcagcttctccttgatcagctgcagcacgctgacactgcggaaatagctctcgccgaagtcgaaccgcgcgaaattccagaccatcagcgcgaaccgctccggcgccggcttgtcgaagccgaattgaacttcgagcttcttgatgaaatcggggtcgagcccctgcgcgccgcggtatttcgaattgatcgcaccgcctgccccgccgccgccctggctgcgctgcgcggcaaaatcgccgccgccgcccgagacgcgcgaggtgccgccggtgtcggcaccgttgagctgcgcgatgacccgctcgaccggcccgccgggtgcgaactgcaccaccacgaacgacacgaacaggatgccgagcagcgtcggcagcatcaggaagatacgtcgggcgatataggcgctcatcggctacttcgcctgttcgagcttggcggccttggccgcatcgtaccaccaattctccggcgcaccgacgccctgggtatatttcgccagcttctcggtatgaccgaactgatcccaataggcgatcggatgcgtgttgcggtaccactgcggcacccagtaacggccggcgcggaacacccggtcgaaggcgcggcacgcgaccgtcagctcatggcggccgttcgcgccgatgattttctcgatcaacgcatcgatcgccgggttggagatgcctgcgagattgtaggagcccttggtcttcgccgcctgcgaggagaagaacggccgcatgctgtcgccgggcgtcgccgagaagctgaagcgctgcatggtcatgtcgaaatcgaaatcttctacccgggcgcggtactgtaccgcgtcgaccaggcggaacgtcgcatcgatgccgagcgttccgagattcttgatgtaaggcccgtggtgcggttgcagcgagggctcgtcgttgaggaattcgatggtgatgggctcgccgttcggcagcacgcgcttgccgtccttgacgacacagccggcttcgttgagcagttgcaccgccttgcgcagcagcgcacggtcctgcccggagccatcagacatcggcggcacgaacggcaggccgaacacctcatcgggtatctggccgcggaacggctcgatcaacgcaagctcctcaggcgagggcgggccctccgcgaccatgtccgagttctggaacggcgagacggtgcgcgcatacgcatcgtacatgatggtcttgttggtccactcgaagtcgaaggcgcagatcagcgcctcgcgcacgcgcgggtccttgaacttgtcgcggcgcatgttgatgaaccagccctgcgcgccggacggggtgtcgtcgggcagcgtctcgcgcttgacgcggccatccttcaccgcggggaaatcgtagcgtgtcgcccagacgcgcgccgtgaactcttcacggaacaaatagctcttcgaggtgaagccctcgaaggccacatcgcggtcgcgatagaattcgtaacgcacggtgtcgaaattatagctgccgcggttgaccggaaggtccgcgccccaccaatccttgacgcggtcgtactcgacatagcgattgacctcgtaccggccgaccttgtacggccccgagccgagcggcgcatcgagcgtcgagtcctcgaacgacctggtcgcgtaataggccttggagaagatcggcaggctcgcgacaaacagcggcacgtcgcgcgcacgccctgccgcgaaggtcaccaccacggtcgcgtcatcgggcgcctcggccttgacgaagtcgcgcagctgcacctggatcagcgggtgacctttttccttcagcgtgttgagcgagaagaccacgtcctgcgcggtcagcttcgagccgtcatggaagcgcgcctctgggcgcaaggcgaaacgatagatcagcttatccggcgagatctggaccgatttggcggcaaagccgtacatcgcgtcgggctcgtcgttggcgcgcgacatcagcgtcgcgaacgtcatgtccatgccctgcgcgccttcacccttcaggacataggcgttcagcgagttgaaggtgtagtaggactggttgtaggcgcgcacccacgggatcaccgagaaggcaccgcccttcggcgctttcggattgacgtagtcgaagatctggaagtccgccggatatttcaggtcgccgaacacagacatgccgtgcatctcggctccgtcgtcggccactgccggtgcgacacgcaagcctgcagcactcaacgcacctatgccgagaccgagtgcatgccggcgggtcaatagcgccatgcgcgtttccttctaagagcgcttgatctttgcagccttgtcggcgtcgtaccaccagaggctcggaaaacccgtcacgccatatttcggcagcggatcgggccgactgaagcggtcccagcgggcggcgcgctcgaatcctgcggcgaattgcgggaccagatagcaattccagagcaggacgcggtccagcgccttgcagctcgcgaccaggtcggcgcggtccttggcgaagatgatgcgctcgatcagggcatcgaccgccggattcttgatgcccgggcgattgcgcgagcccggccgatcggcggcatccgatccgaagaagtcgcgctgttcgttgccgggcgacagcgactgtccccataccgcagtcgtgatgtcgaagtcgaaattgcggatgcggttctggtactgcacgctgtcgacggtgcggatcgacaccgtcatgccgaggcgctcaaggtagggcttgtagaacagcacgccgcgctcgtcgccggggtcaccggacagaaattcgacactgaccggcttgcccgtgggatcgaccagcttgcggtcgcgattctcgaaccctgcttccttgagcaggcgcgcggcttcgcgaaggttgctgcgcgccgcctcctcattgccgcccaccgggttcttgtacggcgtcgtgaacagctctgcagggaccttgtcgcgcagcgcttcgaggatctgcagctcggcgccttccggcagaccggtcgccatgaactccggaatgccgtcaaaatagctgttgtcgcgatggtagtcgccgttcgagagcagccggtccgacgtctcccaatcataggcgaggttgaaggcgcggcggaccctgatatcggtgaatagcggacggcgcaggttgaacgcgtagccctgcatccgccccgaactcgaattggtgaacttctccttgaggacgcgcttctcggccaccgccggaaaatcataggcggtcgaccattgcttgccgctacgctcgttgaaccaatccagctgatccgccttgaaggcttcccgtccgacggtgtcgtcgcggaagaattcggaccgaacctgatcgaaattgttctgtccgacgttgaccgggatgtccttgccccaatagtcggcaacgcgctccagcaccaccgagcggccggccacgaactccttgatgcgatagggtccggatcccagcgggatctccagcgtggtcgccgtcacgtcgcgcttgttgccttgcgcatccttgccttcccaccagtgcttggccagcaccgggacttcaccggcaatactgggaagctcacggtttccaggcgcatcaaacacgaatttgaggtcgcgctcaccgatcttctcgcatttgacgatgtgccgatagtacgcgttgtacatcgggctgttggccttgaacgcgtcgaacgagaagatcacgtcttcgggcgtgaccggcttgccgtcatgccagcgcgccgccgcgcgcagacggtagatgacgtaggaataatcatcgggataggccgcggcctccgccagcaacccgtaggcggtcgaaggctcgtccagcgaccgcgtggtcagcgtttcgacgatctgcccgacggcgccggcaagcgagcccttcacgccctggatgacgagattgaagttgtcgaacgtgccgagttcgaacgtcctgatgaccccgcctttcggggcatcgggattgacgtagtcgtagcgcttgaagtcggcgggatatttgacgtcgccaaacgtcgagagagcgtgacgccatttcagcccgccgggggcgtcctgcgcgtgggccggagtgatgaccgatgcggcgggagcaagaccgagcgccggagccatcgcggcgcaggcgctagcctggagaagatgtcgtcgggtgatcgccaatgcggaattcctgttgctgtgcacgcctcgctacatgggactcactataaggcaacggttcgacaaattacgttgctttttcctcatgatagctgctggggaacaattccgctgcggcgaaacgccccgataacaagcccgcgaccgccaaacggtttctcccatacgaaaacggccaggcattgcctggccgtccatctgcatatgatcgcaggacaaatccctacttcgaagcggtcgggatcggagccgggtgctctgagttcgaattcagataggcgatgatgtcggcgcgctcgctgtccttcggcacgccggcgaagcccatcgcggtgcccgggacgaaggccttcgggttggtcaggaacttgttgaggtcgtcgaacgaccagtcgccgcccttgcccttcatcgcagccgagaaattgaacccgcggccctcgcccttcttctcgccgacgacaccgtagaggttcggaccgacgcggttggggccacccttttcgaaggtatggcaggcctggcacttcttggcggccgccgcgcccttctcggcggaggcggtctgcaacagcttctcgatcggctcggaggcggccgcagcggcctcgccgccaccgccatgggactcttccttcaccgcgatctcaaaacccggcttctccggctgcttcgcagaaaacaccgatccggcggtaaagctcatcaccaggacgacgatgcaggtgccaagaaccgcaccgaggattttgttgagttcgaaggagtccattttcggtcaggctccgggccttgaatgtcgacttcaggccgggaatacggccgcggggaaagacccgggaatcgacctttcgtgcctccccccaggcagggttgagatatcggtttgcccgcgctctggcaacccgtataaacgcgccgaattcaaccgcctccccggcaatttccgcagcccggacgggccctgacacgaatgacccaatcccgtaccttggtgctgattccggcccgcatggccgccacgcgcctccccggcaagccactgctcgatatcgcgggcgcgccgatgatcgtccacgtgctgcggcgggccgaggaggccgggatcggccgggtcgcagtcgccaccgatacgaccgagatcgccgccgtggtgaaggccgcgggcggtgaggtggtgatgacccgctccggccatccctcgggctcggaccggattcatgaagcgatgacgatcctcgaccccggcggcaatgccgagatcgtggtcaatctgcagggcgatttcccgaccatcactccggacaccatccgcagcgtgatgccgccgctggccgaccccgccgtcgatatctcgacgctggcttcgcggatccatagcgaagaagaggatcaggccccgagcgtcgtcaaggcggtcgggtctccgatcggcgccaaccggttgcgcgcgctgtacttcacccgcgccaccgcgccttatggcgacgggccgcgctaccaccatatcggcctctacgcctaccgccgtgccgcgctggagcggttcgtggcgctgccgccctcgccgctggagcagcaggagaagctcgagcaattgcgtgcgctggaggccgggatgcggatcgacgtcacgatcgtcgacaccgtcccacgtggggtcgacaccccggccgacctcgaaactgcccgcagaatactggcaaaagcctgagccactgataaaaagccccgcatgaacaaaaagctgaaaatcgcgttccagggcgagcctggcgctaattcccacatcgcgatcgccgaggcctatcccgacgccgagccgatgccctgcccgaccttcgaggacgcgctggccgcgatttcctccggcgaggccgatctcggcatgatcccgatcgagaactcggtcgccggccgcgtcgccgatatccatcacctcttgcccgcgtccggcctgttcatcgtcggcgaatggttcctgccgatccgccaccagctgatggcgctcaaaggcgtcaagctcgccgacatcaagagcgtggagagccacgtccaggcgctcggccagtgccggcgcaccatccgcaagctcggcatcaagccgatcgtcgccggcgacaccgccggcagcgcccgcgacgtctccgaacgcggcgacaggaccgtggccgcgatcgcctcgcgccttgccgccgagatctatggcctcgacattctcgccgaggacatcgaggacgaggcccacaacaccacccgcttcgtggtgctggcgcgcgaggccaaatgggcagcgcaaggctccgggccgctggtcacgagctttgtgttccgggtgcgcaatttgccggccgcgctctacaaggcgctgggcggctttgccaccaacggcgtcaacatgaccaagctcgagagctacatggtcgacggcaatttcttcgccacacaattctatgccgacgtcgacggccatcccgacgaccgcgggctcgcctttgcgctcgaggaactgaaattcttctcgcgcgaattccgcatcctcggcgtctatccaggcaacccgttccgcgcgacgttcagcgagacgcaggactgagtcgcgcaaacgcaatccgtttcagcgtcgtcccggcgaaggccgggacccataaccaccgacgttcgtaggcagcaaggcgacaaccagtttgcgcgacaaatggggccgcggcgtatgggtcccggccttcgccgggacgacgactacgatgcggccaccctcttcgcaagcccgaacgcctcggcaagcaggctgtaggacttcttccgcgccgcgtgatcgtagaccgcggtgatcaccatcaactcgtcggcctgactcgccgcgatcagcggctcgagtttggccatcacggttgccgggctgccgacgaacagccgcgcccgattgcgcgcgatcgaggcccgctcggcgtcggtgtagggataggcctccgcctcctcgacgctcggcagcggcagatactggccgcggtcgcggcgcagccggttgagatccatcgatagcgcaagctgctcggcctccgcatcggtgtccgcggcaacgacggcgaccgccaggatcgattgcggcgtcgcgcgccagcctgacggcttgaaatgcgcccgataattcgtcatcgccgcgatcgcgtcgtgggtggcaaaatggtgcgcgaacgcaaagcccatcccgacctgggctgcgagctcggcggaataatcgctcgagccgagcagccagatcggcggcagcggcgaatcgtccggcatcgccaccacattgtggtagggatggccggccgggaaatcgcgcgtctcccacaaggtcagctcatgcagccgctcgaggaaatcatcgccctcgcggcgatcgagccggctgcgcagcgcgtaggcggtggcaccgtcggtgccgggcgcgcggccgaggccgagatcgatgcgtccgggaaacagcgcctccagcatcttgaaccgctcggcgaccacgagcggcgcatggttgggcagcatcacgccgcctgagccgacacggatatgctgcgtcaccgccgcgatctgcccgatcatcaggtcgggcgccgggcttgcgaccgaggcgaggttgtggtgctcggcgagccagtatctgacatagccgaggccatcgacatggcgcgccagatcgatgctgttgcggagcgcggcggcgggcttggtgcctgtcgtgacgacggacaggtcgaggacggaaagcgggatcatggccgacagcctagtgtgacgtcacgaggcgacaaagaccccggccgcgcagggcagtcccgcagcggaaagctggaagaggttgcataggctttgggacgaaacgagacgactcattgatatagcccatggcccacattgtactttggtggcacgtatatcgccggagcatgatttaatataaatatatcaatgcagtaagaaacggttttggccgtcagctcgtcgcccaccatatgtgccccgcagtcgatttttctcgcttcaccgcaaataatgggcaatttcccatatacgatgggctgtctcagcccacccgtttcgattatcttggggctccatatccaggccggatgtctgccctccagttgcggagcccttgcgtatcatgacccagaccatttcctccgtgccgaatggccagcgcgcgccgaaggcgccgaaaatctccttcgagttcttcccaccgaagaccgaggagatggagcgcaatctctgggagaccatcaaccggctggcgccgctgacgccgaacttcgtctcggtcacctacggcgccggcggttcgacccgcgagcgcacccattcgaccatcagccgcatcctgcgcgagaccgatctgctgccggccgcgcatctgacctgcgtcagcgcctcgcgcggcgagatcgacgagatcgtcgatcgctatcatgaggtcggcgtccgccacatcgtggcgctgcgcggcgatccgcccggcggcatcggcacgccctacttcacccatcccgacggctaccagagctcggccgagctcgtcgccggcatcaagcggcgccacgccgacatcgagatctcggtgtccgcctatcccgagaagcatccggaagcgaaggatttcgatgccgacatcgacacgctgaaggccaaggtcgacgccggcgcgacccgcgcgatcacccaagtgttcttcgacaacgacctctaccatcgctacgtcgacagggtgcgtgcgcgcggcatcgagatcccggtggtgccgggcatcatgccgatgcacaatttcaagcaggcccgcaatttcgtcacccgggccggcaccagcgtgccggattggctcgccgagaagttcgagggcctcgacaacgacgccgagacccgcaagctggtggcggccaccgtcgccgccggccaggtgcagaagctgttcaagcacggcgtcgacaccttccacttctacaccatgaaccgcgcggacctcgtgttcgcgatcagccatctgctcggcatcaggccgaacggtgcccagaaagctgcctgaatcatgtccgtaccggtttcccccaagcgtagcgctttgctcgcggctgcccgcgagcgcatcctggtgctcgacggcgccatgggcacgatgatccagggcctgcagttcgacgaagccgccttccgtggcgaacgctttgcggatttccaccgtgacatcaagggcaacaacgatctcctgatcctgacccagcccgacgcgatcacggacatccacgccgcttacttgcgcgccggcgccgacatcgtcgcgaccaacaccttctcctcgacctcgatcgcgcaggccgactacgacatgtcggacctcgcctatgagatgaacctgcaaggcgcccgcctcgcgcgcgccgccgccgagcgggtgtcggccgaagacggcaaggagcgcttcgtcgccggcgcgctcggcccgaccaaccgcaccgcctcgatctcgcccgacgtctccaatcccggctatcgcgctgtcaccttcgacgatctgcgcacggcctacggcgaacaggccaagggcctgctcgacggcggcgccgacctgctgctggtcgagaccatcttcgacacgctgaacgccaaggcggcgctgtatgcgatcgccgagatcatcgaggagcgcggcatcgacgtgcccgtgatgatttccggcaccatcaccgacaagtccggccgcctgctctccggacaattgccggaggcgttctggcattcggtgcggcacgcgcggccgatcacgatcggcttcaactgcgcgctcggcgccgaggatctgcgcgcgcacatcgccgatatcggccgcgtcgccgacacgctggtgtgtgcctatccgaacgccggcctgcccaacgaattcggccagtatgacgagacgccagactacatggcgcggctgatcggcgaattcgccgccgccggcctcgtcaacatcgtcggcggctgctgcggcaccacgcccgaccatatcgcggcgatcgccagggccgtcgccccgcacaagccgcgtgtggtgcccgagatcgcgccgcgcctcagattgtccggcctcgagccgttcacgctgaccgatgcgatcccgttcgtgaacgtcggcgagcgcaccaacgtcaccggctcggcgcgcttccgcaagctgatcaccgccggcgactacaccgcggcgcttcaggtcgcgcgcgaccaggtcgagaacggcgcccaggtcatcgacgtcaacatggacgagggcctgctcgattccgagaatgcgatggtgacgttcctcaacctcgtcgccgccgagcccgacatcgcgcgggtgcccgtgatggtcgactcctcgaaattccacgtcatcgaagccggcctgaaatgcatccagggcaagccgatcgtcaactcgatctcgatgaaggaaggcgaggagaagttcctgcacgaggcgacggtggccaagcgtcacggcgccgccgtggtagtaatggcgttcgacgagaccggccaggccgacacgttcgcgcgcaagaccgagatctgcaagcgcgcctatgacatcctggtcaaccggctcgacttcccgcccgaggacatcatcttcgatccgaacatcttcgcgatcgcgaccggcctcgaggagcacaacaattacggcgtcgacttcatcgaggcgacgcgctggatccggcagaatctgcccggcgcccacatctccggcggcgtctccaatttgtcgttctcgttccgtggcaacgagccggtacgcgaggcgatgcactcggtgttcctgtatcacgccatccatgccggcatggacatgggcatcgtcaatgccggccagatgatcgtctatgacgacatcgatcccgaactgcgccagacctgcgaggacgtcatcctcaaccgcgatcccggcgcgtcggaacggctgctggcgctagccgagaaattccgcggcaaggagaagcagaccaaggagcaggatctcgcctggcgcgaatggccggtcgagaagcggctcagccacgcgctggtgcacggcatcaccgagttcatcgaggctgacaccgaagccgcccgccagaacgcgtcgcgcccgctcgacgtcatcgaaggcccgctgatggccggcatgaacgtggtcggcgacctgttcggcgacggcaagatgttcctgccgcaggtcgtgaagtcggcacgcgtgatgaagcaggcggtcgcctatctgatgccgttcatggaggaggagaaggcacgcaacctcgccaacggcatcaccggcggccgcaatgccgcgggcaagatcgtgctcgcgaccgtgaagggcgacgtccacgacatcggcaagaacatcgtcggcatcgtgctccagtgcaacaatttcgaggtcatcgatctcggcgtgatggtgcccgcgagcaagatcatcgagaccgcgaaggccgagggcgccgacatcatcggcctgtccggcctgatcacgccctcgctcgacgagatgagcttccttgccggcgaactggaacgccagggcatgaacgtgccgcttttgatcggcggcgcgaccacgagccgcgtgcataccgccgtcaagatcgacccgaactatccgggcggcccggtcgtgcatgtcaatgacgcgagccgcgccgtcggcgtcgcctcctcgctgctgtcggccgagaagaagcaggcctatgccgccgaggtgcgcgccgaatatgcgaaaatctcgaccgcgcatttccgcgcccaagccgacaagaagcggctgaagctgccggacgcccgcgccaacaaggttgcgatcgactttgcggcagtgccgccgaagaagccggcgttcttcgggctgaagagttttgacgcctacgatctcgccgagcttgccgactacatcgactggacgccgttcttccagacctgggagctgaccggccgcttcccggcgatcctcgacgaccccaaggtcggcgaggtcgcgcgctcgctctatgccgacgcgcgcaagatgctcgacaagatcatcgcggagaagtggttcaccgctcgcgccaccatcggcttctggccggcgaacgccgtcggcgacgacgtcgaggtctatgccgacgagacgcggaagcaaaagatcgcgaccttccatactctgcgccagcagctcgagaagcgcgagggccgcttcaacgccgcgctgtcagacttcgtcgcgccgaaggacaccggcgtgcctgactatatcggcggcttcgtcgtcacggcggggatcggcgaggacgcggtcgcggaccgcttcaagaacgccaatgacgactactcctcgatcctgtgcaaggcactggccgatcgcctggccgaggcctttgccgagcgcatgcaccagcgcgtgcgcaaggaattctgggcctacgcgcccggcgagacgttctccgccgacgaactgatcctcgagaagtatgacggcatccgtccggcacccggctatccggcgcaacccgaccacaccgagaagcggacgctgttcgcgctgctcgatgccgagaacaccgccggcgtgaagctgaccgagagctttgcgatgtggccgggatcgtcggtctcggggctgtatttctcgcatcccgagagcttctatttcggcgtcggcaagatcgagcgcgaccaggtcgaggactatgcggcgcgcaaggccatgacggtcgccgaggtcgaacgctggctcgcgccggtcttgaactacatcccctcgcaggacggcgccaaaggccaggcgatcgcgccggccgcgacgcccgccaacgacgaggaactggcctcgcatccgcagggctgcacctgcgccgtgcaccttgcctggcgcaagaagaaggtgggcgcgggctagctcttccttcccttctccccttgtgggagagggtgtcgcggacgcagtccgagacggatgagggtctctatccgcggacacagacccctcacccgtccgcgatgctgtcgcatcgcccccaccctttcccacaaggggagaggggaagaatgaggagtgcactccatgcagttcttctccttctggcgatcgctggcgagcttccgggtgcggatcgcgctcaacctcaagggcgtgccggccgaaatcgtattcgtcgatctcgatgcggacgcgcatcgcgctgacgcctatcgcaagatcaatccgcaaatggcgctgccggcgctggtgatcgacgacggcaccgtgctgttccagtcgctcgcgatcatcgactatctcgacgagacctatcccgacccgccgctgctgccggccgatgcgctcggccgcgcccgggtgcgtggactggcgctgatggtcgcctgcgagggccatccgctgatcacgccacgggtgcgccgctatctcgaccgcgagctcgacctgcgcgacagccagcagaacgcctggcggcggcactggacggtcgagacgctggcggcgctcgaaggtcatctcgccggccgcaaggcgaccggcctgttctgtcacggcgacgcgccgaccatcgccgacatctgcctggtcggccacgtcacggcggcgatcaaccagcagatcagcctgtcgccctggccgaccgtgaagcggatccacgagacagcgatggcgctgccggcgttcgccaaggcgcatccctccgcgcagcccgatacgccggaggcaatgcgggcgaagtgagcgtgcggcgcctgctctatccaccgctctccgcgctccgggcaatgcgatcccggaccgtccgcgcgatcgccgccggcgcctcgtcggggatcgcaaagcatgaactggcgttgatctcacacagcacgtaggtgtcggcgccatccgcatcgcgcgggccgtagaggaagtccgcatcccagatcaccggcaacgacgcgtcgtcgatcgccagcgtcttcatcagctgcggaatccattcgtcctccatcgaacggcgcagcgcctggaattgcggcgcatccgggccgtgcatgatgcgcgggccgggctgggcttgcggggaatccgggccttccgggggcggcgggatcaaggccttgatcagctgatgcccgaaccctgcgaccttcgcgccgctgacatagcaacggatcatgccctcgggcagccgcggctggaatggctgatcgatgatgcagccgccccagccgaaatacggctcgcagcgcgccatgaaatcttccagcggcatctcctcgggctggctgccgcgcagcgcgtgcagcacacgcaccgtcgcatcgggcagggcctccaccttccagacgccctgcccgccatttccgcgattctgtttgaggacacgcgggccggctgcgcgaagccgcggcgggaattcggcgctgaaagaatcggcggtggcgtagcgatgcgtgtcggcgccccagcccagatgccgcgtgcggtggagcacctccttgacgcccatcttgaggatgacatcgggatgggcgctgacccacggacgcttcgccgcgacctcgcgcagcagcagatcgagcgccgcgcgcgtcttgccctgatggatcggatcgacccagaccagaacgccgtccatggtcagcagctggtcgcggacgagatcggcgaatgtctcgtcatagacgacgggattggcctcgatgccggaagcagcgagcgcttcgaagacgcgaacgaaacgactgttctctggcgtcgcctcgcggcgcgacgcggcatctccacgccacaggatggcgaccttggaacgacgaattgattgcggttggatgtccatagcaagctccacgacggattgtcgcgcagagcttggaccaaaggtctcacggggagtctgcctttccccgtcagagagactctagacgacggcgcgcaggtttcaagctggaagtgaactgaagcggatcacggcgtgatcccgtgcaggccgaacccaggtgagagcaagcgcgccgccgaagttgaaacaccgctgcgttaccggcgttgagaacatgcctgcggctttctaaatcagggcgtgcccacccgcccccgcggcgccgtcattcgccaccgaagagttcagccgatgcgacctcacatcatctgccacatgggcacgtcgatcgacggccggcttcaccccagccgcttcaccaaggcagctagcggcattcccgccgaagtgctgcgctcccactatgaacgaatccatgacggcttcgatgccgacgggtggatcatcggccgcgtcaccatgaacgagatggccaagggcacggcgcggcacatcgccaatccaccgaggctgccgcgcgagccgcatcttgccaaccgcgacggccgcaagcttgcgatcggcatcgatccgtcgggccgcgtgcatttcggcaaggacaatgtcggcggcgatcatgccgttgcggtgctcggcgaacaggtctccgacagccatctcgccgagctgcgcgaggacggcgcgtcctacatctttgccggccccaagggcgacgatctgccgggcgcgatggcgcagctggcctcgctgttcggcgccgggaggctgttgctcgagggcggcggcgggatcaacggcgcatttctcaagcacgggctgatcgacgaattcagcaccttgatctttccggcggtcgacggcgttgcgggatcgcaaagcatcgtcgactatcgcggccccgaaggcgatcgtcccggcgccggacaatcgctgcggctgacgcattgcgagacgctggaaggcggcatggtctggctgcgccacgccgtggagcgggcgccgggctgaagttgcctcggagagcggcgcaaagcgcgggcgaaccacgtccggcaggcgcggctggatgccgggcatgacgggacggtgatttgttcaagccggtgtcagaacttgtaactcagcgcagcgcgagccacgctgaatctgttctcgcggctggcgttgtagcggatctggctctgcaacggatcggtgccctggaacgtcgccgtggtgccgctcgagccgagatcgacgtagagatattcgccgcgcagcgtccagttgttggtgaaggcatattcggcgccgccgccggcggtccaaccgacgcggacgtcggagttgttgccaagccaaagccgcgacaggcccgtggagaacgccgacgaattggcgatattggtcttcacctcgccgtaggcgaggccgcctgtcgcatagatcagcaggcgctcagtgggcacaaagccgatgcgcccccgcacggtgccgaaccaatcgaccttgctggtgtattgaggattgaagcttcccgtcacgccacccgggagagcgacgatggcgctgccgttccgggtagacttcaggtcgacatagttgaaatcggcttcgacgccgaggacgaccctgtcgatctgggaattgtacccgaccaatccacccgcggtcacacccgcctggttgctgctcgaaaggggaacgcggatgatgttggccggcgggacgatcgaagcgacattgctcctcgtcgtgatattcccgccatcataccagccaccgcccacattcacgccggcatagaagccggaccagttgaacgcgggagccaccaagggcggagccttggtccagctgcgctccgacaggtcagccgccgataccgcgcttgcaaaccccacaaatgaaatcaggccagccccgacaattgcaaaaccacgcattcccattcccattccttgcactcggcgaaaccgccttacttaaggttgtggcacgaacgggaggcttgcgacagcttgtctcattcgaatttgattcttttgtgcgccgtgtggcgaagttgcaacgatccttgctcgcaacccaacgagcggatttgtctcggatcgcgcggatcaattggtcccaggccggtatccggatctgcacgccgcgacgaagaacgcgacgccgtgcgcgacatgctcatcgatctcggggccgagcgctttcaggtccacctcgaacagcgcccggagcagcatcggcaccgcgatgatgtcgaggaacaggcgcgccgtggtcggcaggtgctccggcgcgaaggccggcagcttgccgagctcgtcggattgcgttagctcgtgcagcaggtgaatcccgagctcggtgctgagtgcacgcgcccggcggttaacggtggcggcgaggtccgggaagcggtgcgcctccgcaatggcgagccgcatcaggccgatccggtcggcgtcgaacccccaatgcagcaaggtcgaggcgacgctggtgagacgctcctcgatggtcacgccaaccggcggatcggccttgaactcggcaatgcgcgacaggatgtcccgcgtcaccacctcggtgaacagcgcccgcttgtcgcggaagcgcgcgtagatcgtgcgcttgccggagcgcgcgacttcggcgatctcgtcgatgctcgcgccttcgaacccgcgctgcaggaacaccccgcgcgcagcatcgaggatgcgcgcatcgacctcgccggccaattccttcggcggtcggccggcgcgtacctcgaccgggcccgccgccggtcttgttgccagtttggttgccagtctggttttgggcccccgcggcatcttcagagtgctggtggtcatcgccttgacccgggttccatgagccggccaagccggcaatgtcgggcaatataagcctatcacatctagttgtaaatagaacggtacggttccgttcctattgacgcactctgcaatcgagactatttgccgcacagaacggaacggtatcgttcccttttgcgaaggccgtgccgacctcgctcaccagccaagagcagccatcatgttcgaagacacagttctggagcgcgaccagccggggcacgaggccaccgagggcgcgccctcggctccggcctctcacgagcccatcatcacgtcggagcggccggaggtcaccgcaaaggcgcccgccgaggggcgtcccgcggccaaggaccccgccccaccggcaacggttccgccggaggccaccggcccggtgctgcggcgcggcctgctgcgccgccgtccggtggtctccgcgatcggtgccgtgctgctcgccgccacgctcggcggcggctatctctacatggactacaccgggcatttcgaatccaccgacgacgccttcatcgcggcgcggcagtcggcgctggccccgaaagtgtccggctacatcaccgcggttccggtcaccgacaaccagcatgtcgcagccggcgacgtgatcgcccgtctcgatgaccgcgactatcgcgtcgccctggcgcaggctgaggcgcaggtcgccgccgcgcaggccagcatcgagaatgtcgatgcgcagctcgacgtgcagcaggcgcagatcgcggccagtcaggcccaggtcgaccaggcgcaggcggcgctgaccttcgcccagcagcaggcgacgcgctaccagcatctcgagcagaccggctacggcacggtgcagaattccgagcagtacacctcgcaactgcatcagcagcagtccgctgtcctgagcgcgcaggcgcagctgaacctggcgcagcgccaggtggaatcgttgatggcgcagcgcaagagcgcgctcgccaatctggcgcaggccgacgcgcagcgcgaccaggccaagctcaacctgtcctatacgatggtcaccgccgcgcagcccggccgcgtcgtcaacctgtcggccgcggtcggccagttcgcgcaggccggcaccaacctcacgatgttcgtgcccgaccagacctgggtcactgcgaacttcaaggaaatccagctcgacaagatgcgccccggcgagaaggtgacgctgaagatcgacgcctatcccggccgcaccatcaacggccatgtcgagagcgtacagcccggctccggcaccgcgttctcgctgctaccggcgcagaacgccaccggcaactacgtcaagatcgtgcagcgcgtgccggtcaagatcgtgatggacgacccgccgaccgacgtcgcgctcggcccgggcatgtcggtggtgcccaccgtgcgcatcaatcccgctccgtcgctggtcgagcggcttggcaagctctgatcccgggaggctgtcatgagtgcagcagcaatcgatcccaaaagcctccctgtcccgcgcgtcaccgtcaatccgtggctgatcgccatcgtggtcgcgctcgcgagcttcatggaggtgctcgacaccaccatcgccaacgtcgcgctgccctatatcgcgggcggcatgggcgtcagtgaggacgaagcctcctgggtggtgacgagctatctggtctccaacgccatcatcctcaccgcctcgagcttcctcgccaagatgctggggcggaagaccttcttcctgatctgcctcggcatcttcacggtgagctcgatcctgtgcggcttcgcgccgaacctcaacgcgctgctgctgttccgcatcctgcagggcctcggcggcggcggcatggtgccggtggcgcagtcgatccttgccgacgcgtttccgccggccaagcgcggccaggcgtttgcggtgttcggcatcgccgtcgtggtggcgccggtggtcggcccgacgctgggcggctggctctccgacaatctgtcctggcactggtgcttcctgatcaacgcgccggtcggcgccttcgcgatcgcgctgatcgccgcggtactgcaggagcccgccaggcccaaggaccagaagcaggacaattcgttcgatttcatcggcttcgcgctggtcgcgaccttcctcggcgcgctcgaggtgacgctggaccgtggcctggaggacgactggttcggatcgtccttcatcatcgcgtcggcggcgatctgcgccatcgccttcgtgctgatgatcccgtgggagatgacccgccgcaatccgatgatcgatctgcggatggtcgcgacccggcagttcggcgcgagcttcctcgtgatgctcgcgaccggcgcgatcctgctcgcgaccacccagttcctgccgcaactggtgcagcaggatttcggctacaccgcgacctgggccggcctcgtgctgtcgcccggcggcgtggtgaccatggtgatgatgttcgcggtcggccgtctcgccgccagggtgcagccgaaatatttgatcatcgccggcgcgctggtgatcgcggcgtcgatgtacagcatgaccaatgtctatggcgacctcggcttctggtacatggcgcgctcgcgcatgctgatcggcgtcggcctgcccttgatcttcattccgatcatggcggcatcctatgacggcattccggccggcaagaccgaccaggcctcggcgctgatcaatgccgcgcgcaacaccggcggctcgatcggcgtctcgctggtctccaacgtgctgacgcatcgcgagcagttccaccagagccggctggtcgagcaggtgacgccgtcaagtccgcaatatcaggacaccatgcatcgaatgaccgacttcttcattgcccagggcagttcgctgctgcaggcgcagcagcaggcggtgcagtggatcggtcagcaggtgcagacccaggcctcgttcctttcctacatggacgcattctgggtcctgatgctgatcgcgctctcggcgatcccactggcgctgaccttgcgcaacatcaaactcggcggccccgcccccgcgggtcattgatcaggcgcatcgtctcgacccggatcaaatgccgccggtggcggcgacgatcgtgtccctgagccagcggtgcgccggcagatcgtcgaagcggcggtgccagcacatgacactgtgcagcttcgacgcgtcgaacggcaactcccgcatctcgatcggataggcgcggcggaattcgagcgcgagcttgcgcccgaggatcgcaaccatgttggattgcaccagaaccgcgccggccgacagatagggcacatctgatgcaatgatgcggcccgccttgcgtgcccgcagccaggcgtcgatgaaatccagattctcgccgctggaggtgatcgcaagatgcggcagctcgatcagcgcctcgccggtcagcttcttgcgcagggccggatgaccggcccgcagcacagcgacgaagcgatcctcgatcaaccgacgggaggcgaagcgctcgccctccagcgcgccggcggagatcgcaagatcgagctcgccgcgatcgagccggtcggcgagattcaaggtcccgctcggcaccagcgtcagccgcacccggggcgcctgcgcgcgcaccgccgcgatgatcgcgccggcggcaaccaccgcagcataattattgacggcaatggcgaagcgccgatccgcctgcgccggatcgaaacgatcgccttcgaccgccagttgcaggtcgctcagcgccttgcggaccggcagcgccagtgcttcggcccgcggcgtcggcagcatgccggacggcgtgcggacgaacagctggtccttcagcgcatgacgcagccggttcagcgcgtggctcacggcgggctggctgatggcaagtgcgccggctgcacgcaccacgctgcgctcgcgcatgacggcgtcgaacaccagcagaagattgagatcgagattgcgcagccgcatgcattcatcatgcacaatgtgaataggcaaataaagacaattcatttgaataatatcggaccaaggcccagcttccgggcatgcccgagagcccgcacagcgccatcgcaacccggccccatcgcgccaccgcgcgcgtgctggtcggcgtcctggtcgcccccgatgctgctgatatcgccgtaccggaaaccttcgcgcgctggcgacggctcaccccgcttgcgacatggctgccgattgcgctgcgcgaaaccagctatgccggcatcctgagcggcgttgcggccgcgctcgaccgcgtcgggatggcgccgcggcagctgatcctgctcggcgaagggcccatcgcgcggcgcatgctcgaactgacgctgcgcggcgagctgccctgcggcggcatcgtcgcgatcgacgttgcctccgacgcactgtcgtttcccgtggtgccgacggtgaccgcgatccggctcgtgattcatcacaatgacgaagagccgcaaggcagtctgatcggcgcgttgcgcgccgccgatctcgacgcccgcatcatcaatctcgacctcgccgccggccgcgcgacggaagctgccgcggcgagcgcaaccgaaacctttgtcctggagctggtcgcgacgatcggccgccggaccaccgatggagctggtgaaccatgacaatgaagaccatcacgatcgcgggcgtgtgcctggcggccgccgcaatcagcgtcggcttgtatgccgtggatcggccggatcgcgcggccgacagggctccggccgcggcccagtcgaagacgaccacatcagtcgttccggtgacggcggcaaaggtcctgcagcatgatgtgccgatcgtgctcgaaggattgggcacggtgacgccgatcaacacggccaccatccgcacccaggtgcagggcacgctcgacagcgtcgattttgtcgaaggcaagcaggtgaagcgcggcgatgtactcgccaggatcgacccgcgggtctacgaggcccaggtcgaccaggccgaggccgcgctggcacgcgaccaggcgagtctgaagaacgccaggaccaatctggcgcgtacccagccgctcgccactcgcggctttgcgacccagcaactgctcgatacccaggattcgcaggtcgcgcagggcgaaggcaccgtcgcgctcgacaaggccgcgcttgaggccgcacagacccagctgagctacgccacgatcacggcgccgttcaacggcgtcaccggcatccgccgcatcgatcccggcaacgtcgtgcacccgaccgataccaacgggcttgtggtcctcacccagctgcagccgatcgcggtgatcttcacgctgccatccggcgacatccccggtgtccagcaggcgctggcatccggcgacgcatcggtcgacgtctatgatgcccagaacaagcacaagctcgaccacggcagcctgatgctgatcaacaaccaggtcgacagctcgaccggcaccgtgcagctgaaggcatccttccccaatgccggcaacacgctgtggccaggcaccttcgtcaacgttcatctgacgatcgccgttcggcacaacgcgctcaccgtgccgctgacggcggttcgccaggggccggacggcgccttcgcctatacggtcggcccgaacaacgtcgtcggcatccgcaatgtcacgaccggccaatcgcgcgacgggcaggtcctgatcgagcagggcctcgcggccaacgagaccgtggtcaccgcggggcagtaccggctcaatcccgggaccacggtcgagatcgtgcccgacgacaagaaagaccaggtccaggacgcaaccaccgcaagcgcagggatgctgccatgaacgtctccgcaggtttcatccgcaagcccgtcgccaccgcgttcctggccgtcgccatcgtgctggtcggcatcatcgccttcgtgcgcctgccggtctcggcgttgccgacggtagataccccgaccatccaggtcaccgcgcaattccccggcgccgacccgcagaccatggcctcgtcggtcgcaaccccgctggaacggcagttcggtcagatcgccggcttgaccggcatgagctcgagcagcgggctcggcaacacccagatcacgctgcaattcgcgctgaaccgcagcgtcgatgcggcggcgcaggacgtgcagaccgcgatcgatgcggcatcggggcaattgcccaagacgatgccgtcgccgccgaccttccacaaggtcaatccggccgacgtgccggtgctgctgatcgcgctcacgtcggacaccgagccgctgaccaaggtcgacgactatgccgacagcatcctggcgcagaaattgtcgcaggtgccgggtgtctcgctcgtcaccatcggcggcatgcagaagccgtcgatccgggtgcaggtcaatccggccaagctcgctgccgcagggctcgatctcgagcaattacgcgccacgctcggcaacatcaccgtgaaccagcccaagggggtgctctacggcagtcagcaggcctatacgctcgccaccaacgaccaggtgctggtcgcgaacaagtatgacgatctgatcatcgcctatcgcaacggcgcgccggtgcgcctgcgcgacgtcgggcaggccatcgtggcggccgaggacgtcacgctgcacggctggtacaacgacaagcccgccgtcattctcgcgatccagcgccagcccggcgccaacgtgatcagcacggtggacggcatcaagaagctgctgccacagctggtgtcgagcctgccgtccgacatcaaggtcacgatcgcctcggaccgaacgcagaccatccgcgccagcgtcgccgacgttcagctcaccctggtgctgaccatcgcgctggtggtcggggtgatcttcctgttcctgcgcaatctgtgggcgaccatcatccccgcggtctcggtcccgatctcactgatcggcaccttcggcgtgatgtatctgctcaactacagcctcgacaatctgtcgctgatgggcctgtcgatcgcggtcggcttcgtcgtcgacgatgccatcgtgatgatcgagaatatctcccggcatatcgaggaaggcctctctccgatgcaggctgcgctgaaaggcgcgggcgagatcggcttcaccatcatctcgatctcggtctcgctgatcgcggttttcattccgctgctgctgatgggcggggtgatcggccgcatgttccaggagttcgccgtcacggtatgcgttgccatcgtggtgtcggtgatcgtctcagtgacgctgacgccgatgatgtgcgcctatttgctatcgccgcaccagggcgccgaggccgggatcatctcgcgcacgctggaacgcggcttcgtcgcgatccagacgggctatgaagccgtgcttgccgcagcgctgcgctacaaggccgcgacgctgtcgatcatgctggcgagcgtcgcggtgaccggcttgctgttcgtgggcatcccgaagggcttctttccgcagcaggacaccggcatgatcaccggcatcacggaggcctcggccgacatctctccggcgcaaatggcgacactgcaacgcagcgtcatcgatgtcatttcgaggaatccctcggttgccaatgcgaccggttatatcgggccgggcggcccgaccgtgaccgagaacaacggccgcctgttcgtgctgctgaagccgcgggccgaacgcaacgcatccgccgatcaggtgatccgccagctcgacaccgcgttgcagaagatcaagggcatgtcggtgttcatgcaggcaacgcaggacatcaatctcgcgagccgcctgtccaagacgcagtaccagttcaccctcaccgacgtgaaccaggatgagctcaatctgtgggccggcaagctgtatcagaagctgaagacgctgcccgaattggccgacgtcgcgaccgaccaggccaacgccgcgcgtcagctcaagctgcagatcgaccgcgacgcggcctcccgcctcggcatcgatccggctgccgtggacaacacgctctatgattcattcggccagcggcatgtcgcccagctgttcacgacgctcaacacctattacgtgatcctggaggtcgatccgtcgttccagctcggcccctatgcactcaaccgcatctatatccgttcgtccgcggggaccatggtgccgctcagccagatcgcgagcatcgactacggcaccgcgccgctttccgtgaaccatcagagccagttcccgtcggtgacgctgagcttcaacctggcgccgggcacggcggtggggaccgcggtcgcggcggtgcagaaggcgaccgccgagctgcacgtgccgtcgaccgtcgtcaccagcttccagggcaatgcgcaggcgttccaggcggcgctcgcgtcgacgccgatcctgatcctcgccgccttggtcgccgtctatctgatcctcggcatgctttatgagagcacgatccacccgatcacgatcctctcgaccttgccgtccgccgggctcggcgcgctggtcgcactgtgggcgttcggcctcgggctcgacgtgatcgggctgatcggcatcatcctcttgatcggcatcgtacagaagaacggcatcatgctgatcgatttcgcgctacaggccgagcgccaccagcatgtctccgccgaacagtcgatctacatggcctgccgggcgcggttccgcccgatcctgatgacgacaatgtgcgcgatgctcggcggcgttccgctgatgatcggcaccggcaccggatcggagctgcgtcagccgctcggctttgccatcgtcggcggcttgatcgtctcgcaattgatgacgctgttcacgacgccggtcgtgtacatctacctcgacaggatcagccggtcgttggccaacctgcgcgcagttgcgcggaaggacgcgccgcacgaagccgaggcggcctcgtgacctgctcgctcagcccgcgcggcgccgctggccgcgccaccacaggccgaaggcgatcgtgaccgcggccgccagcgagaaccaggtgatggcgtactgcatgtggtcgtccttgagatgcaccttcaaaggcccgggcttcggcgtgccgctatcgggcaccggcgcttcgaggtcgatatagaacggcgcgacctcgccccagccgagcgcctgcgccatggcgcgatggtcgcgcacgaaccacagccgcttcgatgcatcttccttcggcgtcagccggcccggcggctcgggataacggatatagcctgtgagttcgaccggcgcgccggtgacgaggcgacctgtgacgcgatcctcgaaagcgcggtcctgcatcgtgttctggacgaacccggtgttgatcacgacggtctcgccactggcaagcttggccggcaggaacgcccaggtgccgggccccgaaatgtcgtcgcgcaccgcggagccggagctgaacaccatcgcgtcgggcagctttgcgtaagtcgcggtcaaagtgacgcggcggaattcatccttcgccgaggtcagcgtgggccatgccgatggcggcggcagcgcctcggtcggcgcggccagccgcgcgtcgagcgctgcgatcagcgcatgcttctcgacccggcgctgcaactgccagacgccgagcgcgatgaacaccgcgatcaggatcagcgtgaaaaggccgaagccggccgcgctcggtcggcgcgtagagacgtcattcatttcgggtcgcgctcgatcagttggccttcggcggccttgtggtggaattgcagcgcgatcagcagcgccttcatcgaacgcagcggcaggatcgtggtcaccacgatcaacggcagccatagcgcggcatgcacccagaatggcggctggtacttgacctcgacgatcagcgccgccgcgaccacgatggcgccggccagcatgatgatgaagaccgccggcccgtcgccggcatcgatgaaggcgtagtcgaggccacaggcctgacagcgcggcgccagcgtcagaaagccggaatagagcttgcccttgccgcagcgtgggcagcggcaggcgatgccgcggatcgcgctttcggtcacagtgggcgggatatcggtcatcggctctctatcaaaagcaaagggggcggccatcaggccgccccctcttagcacgtcggcgaagtcagtgggcgccgtgcgccatcgactcggcgccgtggccccagacatagatgcagatgaacaggaacagccagaccacgtcgacgaagtgccagtaccaggcggcgaactcgaagccgagatgctgcttcggcgtgaagtggccggcataggcgcggatcaggcagaccagcaggaagatggtgccgaccagcacgtggaagccgtggaacccggtcgccatgaagaaggtcgcgccatagacgttgccgccgaacgagaacgtcgcatgggcgtactcataggcctgcacgcaggtgaaacaggcgccgaggatcacggtgaggatcaggccctgcttgaggccctggcggtcgttctccagcagcgcatggtgcgcccaggtgaccgtggtgcccgaggtcagcagcagcagcgtgttgagcagcggcagatgccagggatcgaaggtctcgatgccgtggggcggccaggtgccggggacggagcatgcgcccatcgccgtgccggcgccgcagccgaacaccgcatcgcgcgtggcgtgcaccgcatcggccgggaacagcgccgagttgaaaaaggcccagaaccaggcgacgaagaacatcacctcggaggcgatgaacaggatcatgccgtagcgatggctgatctgcaccacgcgggtgtggtcgcccttgtactgggcttccttgatcacatcgccccaccagcttgccatggtgtagagcacgccgatggtgccgacgccgaacacgatcggcgcggcggagaacatgtggtgcatccagccgatcgcaccgagcgccatgatgaaggccgagaccgagccgaccaccggccacgggctcgggtcgacgagatgatagtcgtgatgcttgacttgcgcctcagccattgccgtctctccattcgcgtgccgcaaggcacgtcttaatcttaaattccaatctcttcagcatgatcttctcggaaaaccggaccccacttttccggatcatgctctagccgcccttgcgctgctccgcctcgccggccgccacgggcttcggcgtagcgtcgcgcacgggaaagaaggtgtaggacaaagtgatcgtcttcagcgtgtcgttctcgctgtccttggccagcgccggatcgacatagaacaccacggccatctcgcgcttctcgcccggcgccatggtctgttcagtgaagcagaagcagttgatcttctggaaataggcgccgaccgtcagcggcgcgacgttgtaggctgcctggccggtcgtggtgcgcgccgactggttggtcacggtgtagtagaccgtgacgacctggccgatcttgacgtcgatcgtggtctgctcggcctcgaacttccagggcaggcccggcgcgacgttggaatcgaagctgaccgcaatggtgcgctcgagcggtgcatcagaaggcgccgacgtcgcgacctgggtggtgccgttgaagccggtggtgcggcagaaccagttgtagaacggcacggccgcgtaggacgcgccgaccatcagcaccacgacgaagccgcagatcgacgccaccagggcgtcgcgggtcagcatgcggcgcgtgaccttggcaccctcgccttgcggagcctgctgcacaccctggttcgccatctcgctcacagcggtcgcaccagcacggccggccccttcaccagggtgacggcgaagaacagcaccaccatgacgccgagcgcgagcgcaatcgcgatcgaacgctggcggcggctcttgagttgcgcctcggtgaggacgatgccgtctggttcgttcttgtcgtccattgctgtcccgtgtgcccccatctcgccccccggcgtccctatccgatgaaggcaggcaggatcgcgcggaccacgacctcggcaaggaggacggcgaacagcgcgaacagataaaggatcgagaacgcgaacagccgccgcgtggcgcggttggcaaccgtgccctcgcggcgacggtaaacctcgatggcgagccacagcatgccggcgcccagcaccagcgaggtgacgccgtagatcgcgtcgaaatagccgagcggccatggcgccagcgcgatcgcgaccagcacgacggtgtagagcaggatctgcaggcgggtggcgtcgggaccggcgaccaccggcagcatcgggatgccggcgcgcgcatagtcgtcgctgcggaacagcgccagcgcccagaagtgcggcggggtccagaagaagatgatcatgaacagcaggatcggctcgaccgagagcgagccggtcgcggcggcccaagccaccaccggcggcagcgcgccggcggcgccgccgatcacgatgttctgcgcggtccagcgcttcagcagcatcgtgtagatcacggcatagaagaagatggtgaaggcgagcagcgcgcccgccacccagttgaccaggatgccgagcgtcatcaccgagaagaaggcgagcgtcaggccgaaggcggccgcctcggcctgggtgatccggccgcgcggaatcggccggttggcggtgcgcgtcatcaaggcgtcgacgtcgctctcataggccatgttgagagcgccggaggcaccggcaccgaccgcgatgcagaggattgaggtgaacgccagcaccggatgcacatgaaccggcgcgatcatcagcccgaccagcgcggtgaagatcaccagcgacatcacgcgcggcttcagcagcgcgatgtagtcgcccacttcagcctccgagatccggggcaattcaatggcgttgtgatcgacaaccgacaagatcaggtctcacttctctgcaaaaggcgcggcgcacccgcaggtgcgccgcgttgtcgtggacttactgcacgcgcggcagcacttcgaactggtggaacggcggcggcgaggtcagcgtccactcaagcgtagtggcacccgcaccccacggattgttcgcggcctgctccttgcggacgaaggcatcgatcacgccgtagatgaagatcaggacgccgacgccggagatgtacgagccccaggaggagatcaggttccagccggcgaacgcatccggatagtcgacatagcggcgcggcatgcccgacaggccgaggaagtgctgcgggaagaacaccaggttgacgccgacgaaggtgaaccagaagtgcgccttggcgatcttctccgagtacatgtagccgaacatcttcgggaaccagtagtaccagccggcgaagatgccgaacacggcgccgagcgacagcacgtagtggaagtgcgccaccacgtagtaggtgtcctgcagcacgcggtcgacgccggcattggccagcacgacgccggtgacgccgccgacggtgaacaggaagatgaagccgatcgcccagatcatcggcgccttgaactcgatcgagccgccccacatcgtggcgatccaggagaagatcttcacgccggtcggcaccgcgatcaccatcgtggcggcgacgaaataggcctgcgtcgccgacgacatgcccacggtgtacatgtggtgcgcccacaccacgaagccgatgccgccgatcgcgaccatggcgtaggccatgccgagatagccgaacacgggcttgcgcgagaaggtggagacgatctggctgatcatgccgaaggcgggcaggatcaggatgtacacttcggggtggccgaagaaccagaacagatgctggaacagcaccgggtcgccgccgccgtcggccgcaaagaaggtggtgccgaaattgcggtcggtcagcagcatggtgatcgcgccggcaagcaccggcagcgacaacagcagcaggaacaccgtcaccaggatcgaccacacgaacagcggcatcttgtgcagggtcatgcccggcgcgcgcatgttgaagatcgtggtgatgaagttgatggcgccgaggatcgacgaggcaccggcgagatgcagcgacaggatcgcgaaatcgaccgccggacccggatgacccgaggtcgacagcggcgcgtacatggtccagccggcgccgacgccgttggcgcccggctcaccctcgacgaaggtcgacagcagcagcagcgcgaacgaggccggcagcagccagaacgagatgttgttcatgcgcgggaacgccatgtcgggcgcgccgatcatcagcggcaccatccagttgccgaacccgccgatcatcgccggcatgaccatgaagaagatcatgatcaggccgtgcgaggtcacgaacacgttataggtgtgcgtctcgtggaatatctggacgcccgggtacatcaactcggcacggatcgcgatcgacatcgcagcgccgatgacgcccgcgatcaccgcaaagaccaggtacatcgtaccgatgtccttgtggttcgtggagtagagatagcgccgccatccggtcggatggtgggcgtgatcatcatgggcgtgatcgtcgtgtgtcgctgcgcctgtcgccatgttcaaaatcctgccttgcagtccctctcggaccttgcggtcccgtcgcccttattccgtccgcgccgtaagccgtccggcttactgcgccgcctgaccagccgaggcgtaggaattcgccgggttggtcgcaaacttcttcttcgcgccttcaacccaggtcgcgaattcctggtcgctgacgacccgcaccgcgatcggcatgaaggcatggtccttgccgcacagttccgagcactgaccgtagaacacgccggtcttggtcgccttgaaccagctctcgttgaggcggccggggaccgaatcgatcttcacgccgaacgccggcaccgcgaaggagtggatcacgtcggcgccggtggtctggatccgcaccaccttgttgaccggcaccaccatctcgttgtcgacgccgagcagacggggctgcttgtccttgtcgagcagcgagtcgaactcgaacttgccgttatccgggtaggcgtaggaccagtaccactgcttgccggtgaccttcacggtgaggtccggcttcggcacgtcgagctccaggaacagcaggcggaacgacggcaccgcgatgccgaccaggatcaggaccgggatcagcgtccaggccacctcgatcagggtgttgtgggtggtcttggaggggaccgggttggcgcgggcgttgaacttcaccaccacgatgacgagcagcgccaggacgaacagcgtaatgacggtgatcagcaccagcaggaaattgtggaaccagatgatgttttccatcaccggggtcgcggcttcctggagcgtgtgctcccacggcgccggctgccccatctcggcgaaggccgatcccgcggcgacagacgccacacccgctaccgtcaaccccagcaattgcctgcccaaccggccaatcgacatcttcatgccgctcgcgctcccttgcattattccccaaagcacctccggcatgtggccgaaaatgcagcacgatccgccctgacaaacggccttccggacatacccgtctctgagtcaaggtgggtacgggagccagatcgctagaacgcgtcgaaatccagcctctcaaaccataattctcaggcgctcgcaatgcagtagtagggccgaaagccatgcgcctgcgatgaagctgccgcttgcgatttttcccgcaaaatcaagcgaaaggcggccgcacgcagttgacaggcggattaccggatgtaggcacaggcgcggtagcccacaggaacctgattcgctgcgggctgccccaatccggcgcgggaatggctccaagatcgccttcaaggcgccgtcattgcggtatcagtcggctgttgcgcgctaccggcggccggaacggccggacccaacattttagaggatcgacccggatgggcgcttcgaacattcaggcaggacgggcgctgccgcgctggctcggcgccctcttggcggccgcattttcgctcggcctgagccaggcggccaacgcgcagggcgcggtgcgctcggtccatggcgactggcagatccgctgcgacaccccgcccggcgcccaggccgagcaatgcgcgctgatccagagcgtggtagcggaagaccgctccaatgccggcctgaccgtgatcgtgctgaagaccgccgaccagaagagccgcctgatgcgcgtggtcgccccgctcggcgtgctgctgccgtccggcctcggcctgaaactcgacaaccaggacgtcggccgcgccggcttcgtccgctgcctgcccaatggctgcgtcgccgaggtcgtgatggacgacaagctgctcggccagctcaagaacgccaagaccgcgaccttcatcattttcgaaaccccggaagagggcatcggctttccgctcagcctgaacggcctggcggagggctatgacaaattgccctagggcgctcccttagctgcggaagcacgtaccccggatggagccaatggccgcgtcaagcgcacggtctatcccgaggtgccgccgcggattgagtatgagatgacgccgtcggcgaaggcgctcaggcctgtatgttcgacgagttgcaccgatgggcgcaggagcatggctttccgacctcgaccgggagcgccgcgcagtcggcgccgtcgagcgatgagcccgagccggaagaccagccgcggagggcggaccggcgcgcgcgctgatgacgacaaggtgaggatcgcgcggggctgccgtgatcgccgtcactgtcccagcccctcccggtttgccacccaaaacactatgtttgacggtcgccatccggccctgaaccaggaccggcgcagctttccgggttgtaagatgcgttttccgctcgtctctgcttcaatcgccccgaaatccctgcgtccgggttccccactggcaatcagttgcgcttcaggcaaggatgacacggaacgcccaaagaatcgcactgcgtcggagtgaccatgaccaatcccgccacgacctccctgctcgaccgcgccaatctggaccgcgatgccgttcgccgcgaggtggcacgcggccttgaaggcgccgacgacggcgagctgttcctggagttcgggcagaccgaggcgctggtgttcgacaacggccggctcaagcaggcgacctacgacacctcgcagggcttcggcctgcgtgccgtcaaggacgatgcggtcggctatgcgcattcctccgacgtctcgatcccggcgctgatccgcgcggccgatgcggttgccgcggtgcgcggcggctatgccggcacgttcgccgcggcgccggcccacaccaatgtcaggctgtatggcgacgagaacccgctcgacggacctgcgttcgaggccaaggtcaaactgctcggcgagatcgacgcctatgtcagggacaaggacccgcgggtgcggcaggtctcggccagcctcaccgcgacctggcaggtggtggagatcctgcggcccgacggcgagagctatcgcgacatccgcccgctggtgcgcgtcaacatctccgtggtcgcaggccaaggggaccgccaggagagcggcagcaagggttatggcggccgcgagggctatgcgcgcttcatcgagaccaaggcctggcgcgacgctgccgacggcgcgctgcgcgaggcgctggtcaatctcgaatcgatgccggcgcctgccggcgagatggacgtggtgctcggggccggctggcccggcgtgatgctgcatgaggccgtcggccatgggctcgagggtgacttcaaccgcaagcagacttccgccttcgccggcctgatgggccagcaggtcgcagccaagggcgtcaccgtggtcgacgacggcaccatggcctcgcgccgcggctcgctgtcgatcgacgacgagggcacgccgaccaaccgcaccatgctgatcgaggacggcatcctggtcggctacatgcaggaccgccagaacgcacgcctgatgggcatgaagccgaccggcaacggccggcggcagagctatgcccacgtgccgatgccgcgcatgaccaacacctacatgctggcgggcgaccgcgacccggccgagatcatcgcctcggtgaagaacggcatgtatgccgccaatttcggcggcggccaggtcgacatcacctcgggcaaatacgtgttccagtgcaccgaggcctacaagatcgagaacggcaagctcggcgcgccgctgaagggcgccatgctgatcggcaacgggccgaccgatctccacaggatcaccatgatcggcaacgatcttgagctggatacgggaatcggcacctgcggcaagaacggccagggcgtgccggtcggcgtcggccagccgacgctcaggatggaacggattacggtcggaggaacgggctagtgagcagcggaaacgaagtcgtggcggccaagccgaccagctggcgcggacaggccgtacagctggccgcgatcgtggccgtcgtgttcctcgccaagggcgcgatcgccgagccgttctacgtgccgtcgggctcaatggagccgacgctgctgatcggcgacgcgctggtcgcctcgaaatatccctatggctacggcgcggcgtcgctgccgatccagatcacgctgccggagaccggccgggtgttcggcgagacgccgaagcgcggcgacgtcgtcgtgttccgctggccgggcgaccgctcgcaggcctgggtcaagcgcgtggtcgggctgcccggcgatcgcatccagatgcggcagggacagctcttcatcaacgatcatgctgcggcgctgaagcccgacggcaccggctttgctgaagacgatcgcggcggcggcgaggacgccaatcgctatgtcgagacgctgccgaacggtgtcagccacgcgatcttcaagatccgcgacaatggccggctcgacaacacgcccgaggtgacggtgccgcccggcaatctgttcgtgctcggcgacaaccgggacaattccgccgacagccgcgtgccggtgcgcgacggcggcgtcggcctgttgccgatcgacaatctgatcggccgcgcggacgcggtggtcggctcctgggacatgggcatccgcagccagccggtctggacctggctctccggcttccgcctcgcgcgtttcttcacctcggtgcagtgagtaggtcaacgtgaccttcgacgacgtcaggaccctggtgctggcgtggccggaggtcgaggacggcacgtcctacggaacaccggcgctgaaggtgcgcaagaagatgctggtgcggctcaaggaggacggcgacagcctggtgatgccgggcgtgccgccggatgagcgcgacatgctggtcgagagccagcccaggctcttctatttcaccgatcactatcgcgattatccgaccgtgctgatccgcctgtcgaaagccaaacgtgcgaccgtcgagccgctgctgcgccggcactggcgcacgctggcctcgaagaaggcggttcgggattacgatgcgacggcaacgtcgtgacgcaagacgaattcctcgccgcggcactgcgcaacccagtcaatccagcgatcacaggcgagcttgaccgcctcggtctgcctgatgcctggctggtggccggctgcctggtgcagagcgtgtggaacgtgctgacaacgcggccgctcgatcatggtatcagcgactacgacgtcttctatttcgattccgacacgtcatgggaggccgaggacgccgtcatccgcgacctcacggcgcgactcggccatctcggcgccgcgatcgaggtgcgcaaccaggcccgcgtccatctctggtatcccggcaagcacggcgtgccctaccctgcgctgtcacgttcgaccgacggcatcgatcgcttcctcagcgcgaacgtgcaggtcggcatccggcgtagtgcgagcggttacgacgtttatgcgccgagcggtttcgacgatgtcgccgacatgatcgtgcggccgaaccggaccgcgaatttttccgcggcgaattacgccaagaaggcagcgcgatggaagacgctgtggccggagatcacggtgatcgcggcggagtagcctgtcgttcctgcgaacaggttcgcagggacgacgctttgtgtgcggccgttaccgcaccacgcccgacgtgaaccccgccttgcggcgcggcggcttgatctccttcttgaggaagcagtgcgcgtcgcggccggcatagccgggccgggcgtaggtccaggcgcggcacttgttgtcagcggtgcaggcggcctggcaggcctcgtcgccgtcgctgctcttcagttcgaaattcttgtagtcgccgccgaggcggtcgatcgaggtttcgatggcgccgttgcgcggttcgaccacgccggcgccgcgcaccccggagacgcagcaaacgtcctgcacccgcggcggcacgctgttcttcagccagcacaccgcgccgttgttggaatcggtcggatagttgaagctccaggcgcgacagcggcggtcgcgctcgcaggtcagcgcgcaatcggcggggtcacccgacgtcaccggcgcgttcagatagtctccgccgggacggtcgaaattggtttgcgccaatgccgggcgcgtgacggcaacggccgacaagaccgcgaacatcaccacacacgccctaaagaggcggcctatccccatgacattgctttcaaattcgtacagccccgcgcatcccgcggggcgtcatttgaacgccatgaacctgtacggctgatgaacggcgcggcagcggcgggtgcgacaacaccgccgtccgcacgcgttcggggcgcgggccgggattagaaggcgtattcctgataggccggttccacggagcccttccagggcccgttgaacttctccagcatctcctcggccggcgagcggccggtctcgatgatgcgctcaagcggttcgaggaagcggctctcgtcgcgtccgagatggtcgatccggccgcgccggcgcaatccggcatgcgacaggaccaggcactccttggcgatctcgaacagatagcggtccttgatccgtgccttgaagccgaagcgcggcacgtcatcgcgcagcgcctgccgctccgccgcggtccagtgccggacgatatcccaggcggcatcgaggctgtcattatcgtagagcagcccgacccagaacgccggcagcgccggcagccggccccacggcacgccgtcggcgccgcgcatttcgagataacgcttcagccgcacctcggggaagatcgtcgagaggtggttggcccagtccgacagcgtcggccgctcgccggggagaatcttgttgttgccggcgaagaaatcgcggaacgacgagccggagacgtcgatatattcctcgccgcgcttgacgaaatacatcggcacgtcgagcgcgtaatcgacatagcgctcgaaccccatgccgtcctcgaacgcgaacggaatcatgcccgagcgcgcattgtcggtgtcgcgccagatttcggagcggaacgacaggaagccgttcggtttgccttcggtgaacggcgaattggcgaacagagcggtcgcgatcggctgcaacgccagcgacacccgcagcttcttcaccatgtcggcttcggaggagaagtcgagattggtctgcaccgtgcaggtccggaacatcatgtcgaggccgtattggccgaccttcggcatgtagttgcgcatgatcttgtagcggcccttcggcatcaccgggatctgcgcgcgcgaccaggacggcgtcatgccgaggccgaggaagccgatgccgagcggggttgcgacctcccgcacctgcgccagatgtgccatcaactccgactgcgtctggtgcacggtctcgaccggcgcgcccgacaattcgaactgcccgcccggctcgagcgaaatcgcgccgccgccggtgacgtcataaagcccgatgatgttgccgcgctccacgatcggctcccagccgagcaggagcttcatgccctcgagcaacgcgccgatacccttgacgccctcatagggcacgggctggtggccctcgagcgtgaacggggtcttctcgtgctcggtgccgatccggaattcggactcgggcttcacgccggcttcaatccacgccacgagttcgtcgcgcgactgcagcggcgtcatgtcgatctggtcacgcgccataaaaaatccaactcaagggcgcttcgatcgaaggcgcgcggtggcagggacatccgcgggccatgccggccgcggatgatgggatcaggactatcatcgggcgggcacgccgtctcgcgcgggtgcggccttggtatcgctctttgcatcggtctcgccgcaggagcagccgagacggtcgagcagaccgcacagccgttcggcgtcggcgtcggacaatttcgagccgacatgcttgtcgatcgccgccgaataggcgttccacatcttcttctgcagctcgcgcccggcctcggtgatctcgacgaactggccgcgcttgtcgatcttgcattcgcgccgggcggcgagcccctcgtcgaccagcttgtcgatcagccgcgaggtcgaatattgcgggatcagcatctgccgctcgagctcgaccgggcgcagctcgccggacggcgcgcgcgacagctcgagcagggcgtcataccaggcgagcggcggaaagccggccttcttcagatcctgctcgacgcagtccagcacccggctcggcacccgcatcaggcggatccaggcggccgtcgcctcgctcgatagcttgcgtttcatcgtctggccctaagttcccggaacccagtgtaccgcactgaatgcatctgcatcaatcttgactaattcatgcaggcgcatgtaggcaatccctctccggacgccaagaacaagggaaggaatacccccatgaagctttattactcccccggtgcctgctccctctccccccacatcgccctgcttgaagccggcctgccctatgacctggtcaaggtcgatcttcgggccaagaagctcgaaaacggcgacgatttcctgcaagtgaaccccaagggccaggtgccggcgctggcgctggataccggcgagatggtcaccgaaggcccgatcatcatccagatgatcgccgacaaggtcgccgacaagaagctggcgcccgcccgggattccaacgaacgctacaagctgctcgaatggctgaactacatcacgaccgagctgcacaagaatctcggcccgatgttctcgccggtgctcgccgacgacgccaaggcgtttttcaaggaccgcgccatgggcaagttcaaatatgtcgacagccagctcgccggccgcgaatatctgatgggcagccagttcacggtcgccgacggctacctcttcaccatgatcatgtgggcgcaagaccggctcggcttcgatctctccggcctgccgaacgtgacggcctacaaggcccgcgtcgcggcgcgcccgaaggtgcaggaagcgctgaagaaggaaggcctgctgaaagcggcctgagctctcgaagctgcttcatcggacgtgaaagggccggatagcatccggcccttttgtttgggccgcccgatcgggtcagccccaaatctgcaattttcagcagtttgtccgcttccacgtaagcgcgccttcgctatcccgcgaataccgcagccgggattcggcaaccatttgcccgatcggacgtagccggattgctgcctcatccagcgggagatgcgcatgagtagctctctatccagcaacgccgccgaccggatggtcgaggtcctggcgggctcgacggcgctgctggcaaattccagcgacggactctccgacctgccactcccggtgacatctgtgctgcctgacgacggcacggccgatacggctgccggcccgccggcccacagcctgatcgatccggtaccggcggcaaatgcgctggacggcgcgacgtccctgctcggcgacggcgccgcagccgcggccggttccgacctgcccctggtcgggagcttgctgaacacgagcgagctgccggtgatcggcattgtgttgaacgccgcattgcccgtcgagccggattcgacagcgctcgcagcatcgggcggagcgctgcaaccggtgctcgacaccgccacgaccgcggttcaaggcggcgtccattcctcagccggtgtcctgtcccaggcgaccgcactgcccgacatgcttcatggcctcaccaatctcggacaggcgatcgatctcggcaacatcagcaccatcgggaccagcaatggcggccatgccaatctggtcgccgacattctggtcgtgccgggacaaatccttgccggcaatctcggcgagacggtcgcgcatctcggcgccgatatcagcggcgtgattcatgccgtctcggggctggttgatacggcagtctccgatgtcagcggtctgctgagcccggtcaccggactggtcagccagctgacgcacggcttgctcgatggcggcctgctcaatctcggcggcgacaccgcaggcaacggaccgctcggcggcttgcttggcggcctcattggctccggcagcggccatttggccggcgtcacgatcggcccgcatctgctcgacctcggcgctctcaccggcacgcacgagctcaacattccgagtctcaacattccgagtctcggcggcgtcggcgccgacgggttggccggcaatctgctcggcagtctcaacctcagtctgctcggcgacagcagcgccgccggacacgccgcgagcgcgccggcctccacaccggtcgatctcggcacgatcgggcatgacctgctctcgccgctcacacatggtcacggcatccttgatgcgcacggcacacacatcctctgagattgccgcaaatcggcggatgcgcgcgatcgccgcgcttccgcaactccctctccatgtccattgggcatcacaggcttgaacatccgcggggcgcgatgatcggtcagggcaaacgcttctcctcactgccggttgaaatccgggatgcgatcacggccgtgcgcggcgcgctggttgccgtggcgatggcgagcggcctcgtcaatctgttgatgctggtcggcccggtgttcatgctgcagacctatgaccgcgtgctgccgagccgcagcatcccaaccctggtcggcctgctcgtgatcgcgctggtgctgctcgtcgtgcaggccggcgtcgatgtgctgcgcagccggctgttggcgcgcatcgccgaaatcttcgacgagagcattcgcggcgccgtgttcgacagcgtgcagcatgcttcgctgagccggccgaacggcgacggcctgcagatcatgcgcgacctcgacagcattcgaggcttcatcgccggcagcggcctggtcgcgatcttcgacctgccatggaccccgctctacatcatcgtctgcacgctgtttcatccgctgatggggctcgcagtcgccggcggcgcgatcgcgctggcactgatcacggtcgccgccgagctgttcacgcgcgcgccgacgcgcgcgctggtcgcgctcgcctcgtcgcggcggcagatggcggagaccgcattctaccacgcgcccgtggtgcacgcgctcggcatgcagcagcggatggccgagctgtggtcggaccgcacgcaggcctatctcaacatgcagcgcgtgacctccgatttgaccggcacgttcggcagcgcctcgcgcttcctgcgcatgatcctgcaatccggcgtgctggcactcggcgcctggctcgttatcaatcagcaggccaccgccggcgtgatgctggccgcaaccattctctcgatccgcgcgctggcgccgatcgagcttgcgatcgccaattggcgcagcttcatcgcggtccgcgccagcgtcggccagcttgccgaagccctggcggcggtgccgtcgcggtcggcgttcacgcctttgcccgcgccgaagaacgaggtccgtgtcacctcgatcagcctgaccgcaccggcctccgatgccgtggtgctgcacgaggtgagctttgcactgcgcgccggcaatgcggtcgcggtggtcggccccagcggctccggcaagtcgaccctggcgcgcgcgctggtcggcatcggcgcaccggtgcgtggagtgatccggatcgacggcgcgacgctggcgcaatgggatccgctcgcgctgggcccgtcgatcggctacctgccgcaggacgtcgcattgttccgcgggaccgtcgccgagaacatctcccgcttcgcagctagcccggacgccggcaggttgctggccgccgcgcgcgaggccggcgtacacgagctgatcctccggctgcctgacggttatgagaccgaggtcggcgacggcggcctgatgctgtcgggcggccagcggcagcgcattgcgctggcccgcgcgctctatggcgatccgttcctggtggtgctcgacgagccgaactcgaatctggactccgagggcgagcgcgcgctgatccatgctatcgcgcgcgtccgtgctcgcggcggcatcgtggtcgtgatcgcgcatcggcccgcggtgctgcaggcggtcgatcacatgctggtgctgaacgaaggacgcatgcaggcgttcggcaccacggctgcagtgctgccgctgctggtgccgaaggctgcgcagccggcaccggcgcgccgcaagcgcaagaaggacgcggagccccggcaaaatgcctagcgcccggcaatcggtccatcaccacatcctggcggtcgcgatggccgcggcgttcctcgtcgccagcatcggcatcatgggcgcggccaccaggatgtcgggcgcgatcatctcgcagggatcgctggtggtcgaatccagcgtcaagaaggtgcagcacccctccggcggtgtcgccaagaagctgctggtcgaggacggcgcccgcgtcgccaaggacgatttgctgatcctgatggacgagacggtggcacaagccaacctcaccgccgtgaccaagagcctgtgggagctcgaggcgcgccgcgcgcggctacaggccgaacgcgacggtgacgccgagatcgtatttcccgacagcgtggcatcgctcagcgaccccgcggcgcaggccgtcgtctcgggcgagcgtcggttcttccagctgcgcaaggacgccaatgacgggcagaagcagcagttgaaggagcagatcgcgcagctcaaggagcagatcggcggcatgcaggaccagttgagcgccaagaagcaggaagccgatttgatcgccaacgagctgaccggcgtgcagcagctctgggaacagcgcctagtctcgctgtctcgtctaagcgcgctgcagcgcgattcggcgcggctgctcggcgagcgcggccagctcaccgcatcgatcgcgcaggccaagggcaagatctcggagaccgagctgaagatcctgcaggtcgatcaggatttccgctccggcgtcgccaaggagctcgccgacatcagggccaaatatgccgacgcgatcgagaagcaggtcaccgcgaaggaccagaccgagaagctcgagatccgcgcgccgcaggccggcgtcgtgcacgatctcaccatccacacccagggcggcgtcatcgcggccggcgaaacgatcatgaccatcgtgcccgaccaggacaatctgatcgtggaaactcatgttgcaccgcaggatatcgatcaggtcaagctcggcgcatccgcggtgctgcgcttcaccaatttcaaccagcgcaccacgccggagatcgagggcgaggtcagccggatcggcgccgatgtgtcgcgggacgacaagacgaccccgacctacttccttgtccgcattgcgattccagcgccggagctgaacaagctcgcgaccgcgcatctgctgccgggcatgccgctcgaggtgttcatcccgaccagcgagcgcacggtgctgtcgtatctgatgaagccgctggcggaccaggtgcaccgcgccttcagggagaaatgagcggtgcaaactttcggcgcgccgtggatcaaatcaaatttaatccgcattctaccggttaagactaagtcggcgtacttccggctgagggcgttgccgtccttgttcgtgcgatccaactgaccgactatgacctgcggcgcgccctcggctccaactggtctgaaaatgtgacgatcgtctccacgcttttattgaccagcacgctcgtcgggctggcaaccagtttgtactttcgggtttggacattgatgctggtgtcgccgctgatcgcggtgctcgcggcaatcgtgctccagtccgacggctatgcatttgccaccggcgccccgatcctggtcgcctgcctcgcattcagccagatcgcctatctcgccggcgccttgctgttgccggacaatgacggctcaatggcggaagaaatcgacggcgttccacgccgcggccgcgagcacaagatcaacggccagaaccagtagtgcaaggcctgtccatgacgggcccttgccgcgcagtcgcagcggattccatcgtcgcggcgccggccacgaacgcttgcccgcggtttcagtgaccccatgcttgagcacaacacccatttgcacgacacccgagcctgatcgtctctggcgatcaaccagcaagagtgatgccagcagcgtggtgccagttgggagcaggcgtggcgggactttgaccgccgtgaccgtcgcacaacaggatcaagtcggatcgatgaccggcttgatcctgtacgatgtgtcccggagagagacggcgcttacgccgcctgcttcttcggcgggaagcggccgtagaaggtttcgcccttggcggccatctcctcgagcagcttcggcggcgtgaagcgcgagccgtatttcttctcgaaggcgtggcagagcgcgacgaagttcttcgtgcccatgaagtcaatgtaggacagcgccccgccagtgaacggcgcgaagccgaagccgaggatcgagccgacatcggcctcgcgcacgtcggtgatgacgtgatcctcgacggtgcgcgcggcttccaccgcctgcaccaccaggaagcgctgcttcaactcctcgacgctgagcgtatccggatcgagctgcttcggctgcagatcggcgagccccggccacaggctcttctgacccttgcccttctcgggatagtcgtagaagcccttgccgttcttgcggccgaagcggccctgcttctcgaccatctcgacgatcagcttcttctgcgcctggtcgatcgcgttgggaccgagatcggcctcggtcgccttggtgatcttgaggccgagatcgagcgcgacctcgtcctgcagcgacagcggcccaactggcatgccggccatcctggcggtgttctcgatcatcgccggcggcacgccttcgagcagcatctcgttgccctcggagatataacgcatcacgcagcggttggcgaagaagccgcggctatcgttgaccacgatgggcgtcttaccaatcgcgcggacatagtcgagcgcggtcgccagcgcgacatcgccggtgttcttgccgaggatgatctcgaccagcatcatcttctcgaccggcgagaagaagtggatgccgatgaacttgccctggtccttgaactcctcggccagcgagttgatcggcaaggtcgaggtgttggaggcgaagatcgcacccggcttcagcagcggctgcgccttggcataggtgtcggccttgaccttgcggtcctcgaacaccgcctcgatgacaaggtcgcagtccgagatcacgttgtagtctgatgtcgccgagatccgcgccaggatggcgtcggccgcctcctgcttcatccgacccttcgcgatcagcccgtcgacaacggtcttggcgtggcccttgcccttgtcggcgctctcctggtcgcgatcgaccagcacgacgtcgatgccggcctgcgccgagacataaccgacgctggcgcccatgaagccggcgccgatcacggcaagcttcttgaccttggtcggcggcacgccggccgggcggcgggcgcccttgttcagctcctgcatcgacaggaacagcgagcggatcatcgccgccgcttccttcgagcgcagcactttggcgaagtagcgcgactcgacgcgcagcgcagcgtcgatcggcagctgcaggccctcatagacgcagctcatgatggcgcgcgcggccggataattgtcgtaggtctcgcgacgatagatcgcgtttccggccgggaacatctgcatgccggccttcgagaaaacggggccgccgggcagcttgaagcccttctcgtcccacggcgcgacggccttgccgccacccttgatccagtccttcgccgccttgatcagatcggccgcgggcaccacggcgtgaatcagattgagcgccttcgcgcgggtgagattgacggcctcgcccttgagcagcagttgcatcgcatcagccggctgcacgagacgcggcacgcgctgggtaccgccggcgccggggaacaggccgaccttcatctcgggcaggccgagccgggtcttcgggttttcggccgcgacgcggtagtggcaggccagcgtgatctcgaagccgccgccaagcgcaagcccgttgatcgcggcgacccacggcttgcccgaggtctcgatcgcgcggaacgacagcgacatctggcggctctgctcgaacagcatctggttcgcggcttcctcgcccttctccttgaagagctgtgcgtaagcgcggttcatgccctcgagcatggagaggtcggccccggcgcagaacgcctccttcgccgaggtgatcacgacgcccttgatcgcgggatcgctggtggtctgcttgatgatctcgccgatctcctgggtggagacctcgtcgaacacgttcatcgaacggcccgggatgtcccaggtgacgagagcaatgccgtcggcgtcgacgtcgaacttgaaattcttgtaagccatgttgctcgctcccctcgcctcagacgcgctcgatgatggtggcggtgcccatgccgccgccgatgcacagcgtgaccagcgccgtctccttgttggtgcgctcgagctcgtcgagcacggtgccgaggatcatcgcgccggtcgccccgagcggatggccgagcgcgatcgcgccgccgttgacgttgatcttggcattgtcgatgtcgaaggcctggatgtagcgcagcaccaccgaggcgaacgcctcgttgagctcgaacaggtcgatgtccgacttcttcatgccggagcgctcgaacagcttttcggtgacgtcgacggggccggtcagcatcatcgcgggctccgagccgatattggcgaaggcacggatcttcgcccgcggcttcaggccatgcttcgctcctgcctccttgctgccgagcagcacggcgccggcgccgtcgacgatgccggaggagttgcccgcgtgatgcacgtaattgaccttctcgacctccggatgcgactggatcgccacggcgtcgaagccggccatcgcggccatcgccgcgaatgacggttgcagctgcgccagcgactgcatcgtcgtggtcgggcgcatatgctcgtccttggcaaggatggtcaggccgttgatgtccttgaccggcaccaccgacttgttgaaccggccctcgtcccaggacttcgccgcgcgctgctggctctgcaccgcataggcgtcgacgtcgtcgcgcgagaagccgtatttggtcgcgatcagatcggccgagatgccctgcggcatgaaataggcgggcaccgccatcgagggatccatcggccaggcgccgccggacgcgccgatgccgacgcggctcatcgattccgcgccgccgccgatcacgagctcatgctggccggccatgatctgggccgcggcgaagttcacggcatcgaggccggaggcgcagaagcggctgatctgcacgcccggcaccttctcgccgaggccggcgttcagcgccgcgaaacgggcgatgtcggacccggcctcgccgactggatcgaccacgccgagcaccacgtcgtcgacggaatcctcaggcagattgttgcgctccttgagcgccttcagcggcaccgtggcgagcgccagcgcggtgacctcgtggagcgcgccatcggccttgccgcggccgcgcggggtacgaacgtgatcgtagatgtatgcctcaggcatgacgccctccttgatatgaggatcataatatatacggaaggaagcgccgccgcagcactgcggcggcaattattcagaacgcttccgcggccagttccatcgtggtggcgctgccgctctggatcctggccagatgcacggcggtctccggcagcagccgctccatgaagaagcggccggtgacgagcttggtgttgaggtaaggcgtggcgccggccgcagccttgtcctgcgcgaccttggccatcttcgcccacatgtagccgagcgcgaccaggccgaacaatttcatgtaatcggtcgcggccgcgccggcattgtcgggcttggtcagcgcgttctgcatcagccagccggtggcctgctgcagatggccgagagcggccgaaagcggggtcacgaacggcttcatcgcctcgtcgccaccatgctccttggcaaaggcgccgacctcaccgaagaacgccatcacggcgcggccgccgtcgcgcggcagcttgcggccgaccaggtcgagcgcctggatgccgttggcgccctcatagatcatcgcgatgcgggcatcgcggacgaactgctccatgccgtgctcggcgatatagccgtggccgccgaacatctgctgcgcggagaccgtgttggcaaagccggtgtcggtcaggacacccttcagcaccggcgtcatcaggcccatgtggtcgtcggcggcctgacgatccttcgggtcgttggaacggtgcgcgacgtcgctcttcagtgcggtccacaccaccatggcgcgcgccgcctcgttgaaggcgcggatggtgagcagcgtgcggcgcacgtcgggatgcacgatgatcggatccgcgggcttgtcggcctccttgacgccggtcagcgagcggccctgcaggcgctcgcgggcataggcgaccgcgttctgataggcgacctcggactgcgcgaggccctgcacggcgacgccgaggcgggcctcgttcatcatcacgaacatgccttgcatgcccttgttctcttcgccgatcagccagccggtggcgttgtcgtagttcatcacacaggtggaattgccgtggatgcccatcttgtgctcgatcgagccgcaggtgacgccgttgcgctggccgagcgagccgtcggcgttgaccagcaccttgggaacgacgaacagcgagacgcccttgatgccggccggcgcgccttcgatccgcgccagcacgagatggatgatgttctcggcaaggtcatgctcgccggcggagatgaagatcttggtgcccgtgatcttgaagctgccgtccggctgacgcacggccttggtgcgaagcaggccgagatcggtgccgcattgcggctcggtcaggttcatggtgccggtccactcgcccgcaaccatcttcggcacataggtcttcttctgctcgggcgtgccgtgcaccagcagcgccgcggtcgcgcccatggtcaggccgccatacatcgagaacgccatgttggcggagatctggaattcgttgaccgcctgcgacagcgtcaccggcaagccttggccaccgaattcggtcggcgccgagaggccgagccagccaccctcggcgacctgcttgtaggcgtccttgaagcccttcggcgtggtgacgctgccgtcgtcattgcgcttgcagccttcgagatcgccggtgcggttgagcggttgcagcacctcttcgctgagcttggcggcctcgccgaggatcgcctcgcgcacgtcggccgacgcgtcggtgaagccgggaagattgccgtagcggtcgatctggaaaacgtcgttgagcaggaagctgacgtcttcgacgggggctttgtaggtcggcatgctgatctcccggctggctcgtggccgcatgtgcggccgatgctgcgcagcttgtccttgggtttgttggaacggaccttatccggttccggaggtccgcggcaggtgctagcgagactgtgattgcgacgttgcgccgctctgattcatcaactcctcgcccatcatgcgatgcagcaggttgatcgccttgagcgggcgcaccatcaccttgaaatgcgtgatccggccgtcaccgtcgaaggtgatgatgtcgacgccgttgagcttgatgccgtcgatctcgttctcgaattcgagcaccgcgccgctgtcgctcttccattcgcccagatatttgaaggtcgggccgccgagcaccttggcggcgctggtcaggtatttgaaggtgatgtcgcggccgcgctgcggcgtgtgcacgaccgggctttcgaacaccgcgtcgggatgcagcagatcccacaaagcggcggtgtcgtgggacttcatgtaggcgtaccacttgtcgaggcccggcttgctcattcggacgtctcctgcggctgggttgtagaagcctgaacatcggctgcgcacgagaaggcggcacgccgatcatcatatgcatattgacgcatatgcacagtaacgcataaagtcaagcgaacttgtgaatggtcgatttgggaactcagatggaggtgggcgttggcactcggtgacgcaatcctcgcctgcctcacggaacgtccgatgacgggctacgagctcgccaagacgttcgacgcctcgatcggcttcttctggaaggccgaccatcagcagatctaccgggagctctcccggctgcgcgacaagggccatgtccagggccgcgaggtggtgcagtcgggcaagcccaacaagctggtctacacgctgacggccgagggccgcgcagcgctgaagcattgggcggcgcggccgagcgttccgccctcgatcaaggacgatttgctggtccggctctatgcgctcgactgcgtcgacatcgagccgctgcgcaccgacctgatggcgcggctggaacatcaccgcgaccgctatgagcgctacgagcgcctgctcaacaagcgcttccccgacggcaccgcgcctgcggccgatgtcggcaagatgctcagtctgcggctcgggatgcgccacgagcgcgtcgtggtggagtggtgcgaggaagcgctcgatgcgctgtcggcgatgtccggccgcggcaacgtcacgccgctcgccgacggcaagcgcgagaacaacggctagaagcaaactcgtcacggcttgccgtgttcgtcacgccaagcggaatccgctttgcctgaaaacgataggcctgtcctgatccggcgcaacaggttcccggaatccctaactttaaagcccgccggctgcattccttaacccgttatttaccgtgacgggaaaaagtcagcagctgaagcagacgaccagcgcagaattcgattgtctcttaacgggaatgcgcggggaggctgcgggcgcagagtatggcgccggagtcgggaccggacggaatcatgaattcgcgcgtatcgtggagtgttgacggcatcgatccctccgtccgcgacagggccgaagcggctgcgcgccgcgccggcatgtcgctgaacgactggctcaattcgaccgtcggcgaaccgagcccgccggattggcgcatggagcaacggcagccgatgccgagccgggagagccgcgacgtcgccgatatccatcagcggctcgacgcgatcacccgccagatcgagcagattgcaaagccgctgtcgcgcggcgaagccgtgcgcgccgaggtgccgcgcggccagcccgcggtggcgcgacagctgaacgacgcgatttcgcgcctcgatgcgcggctgtcgcaaatctcgcggccgcagccggcgcgcgagccgcagccccagccgatgcgtgaagcgcagatgcagcgggagccgcagatgcaggaccggcaactggaggaaaggctgcgccaggcggaagcggtcgagcgcgcagcagcccaggtctaccgcccctcgccgccgctaagcccggcgtcgttcgattccgcgatcgcggaaatcgccgcgcgccagaacgagctcgatggcccggcaacgcggcagatgccacagcgcagcgcgccgccgatgcaggagccggccccgccgatggccgcctacgcgccgccgctggcagcgcccgccggcccggacttctcctcgctcgagcgtcacctgctcaagatcacgagccagatcgaggcgctgcaacggcccgaccacatcgagcagtcgatcgcgtcgttccgcggcgagctcgcggaaatccgccaggcgatcaccgaggcgatgccgcgccgcgcgatcgagtcgatcgagaacgagatccgctcgctgcaccaccggatcgacgagatccgtcaggacagcaacaacggccagggccaggcgattgccggcatcgagcgcgcgctgtcggagatccgcgaggcgctgcgcacgctgacgcccgccgagcagctcaccggctacgacgaggcgatccgcaatctcggcgccaagctcgacatgatcctgcgcgccaacgacgatccgtcgacggtgcaccagctcgagagcgcgatcgcggcgctgcgcgccatcgtctccaatgtcgcctccaacgacgcgctgctgcagctctccggggacgtgcacgcgctggcggcgaaggtcgaccagctgtcgcagatgtcgcgcggcgactcctacggcgacgctttcgccgggatcgagcagcgcatcgcggcgctggcctcgtcgctggaaggccgcgagcggccggccggctacgacaacaccgacgcgatcgagggcgccctgcgctcgctgtcggagcggatcgaccgtctccaggtcggcaatgacagctcgtcggccttcacccatctcgaacagcgcgtctcctatctgctcgaacgccttgaatcggccgaccagcgctccggcaatctcggccgggtcgaggaggggctgcatgacatcatgcggcacctcgaggcgcagcacgcccatctcgcctcgctcgccgacgccacccgcaacaccgtcaacacatcggcgccgcagccgatgatggacagcggcatcgtcgatctggtgaagcgcgagctgtccgacatccgcttcagccagtcggaaaccgatcgccgcacccaggattcgctggagacggttcacaacacgctcggccatgtcgtcgaccggctggcgatgatcgagaacgatctgcgcacggtgcgcagcgcgccgccgccggctccgcccgcccccgcgccggccgagctgcggatggacgcaccgcggatggagatgccgcgcgcggcgatgccgcagccggtcgcacatccccaacctgaatcgtacaggccggactcgtaccggcccgaactacccaatcctgcgctggcgcaggagcacttcatgtccgcgccgcgcgaattccatgccgcgcagccggtcgagagcccgccgccgccgctgccgccgcgcgcgatcagcgagatccttgagccgcacgcggcgtccgcgcgcgctgtgatcgcaccggaactgccgccggatcatccgctcgagccgggtacgcgcccgtcgggccgggtgtcgtcgccgtcggagcggatcgcggattccgagcgcgcgatctctgatcttcctgcgggcaagaaggagccggtctcgacctcgagcttcatcgccgccgcgcgccgcgccgcgcaggccgccgccgcacagcccgtcaacgagaaggcggcgcgcgcagcgagcaaggccgccgccaaggccaaggagaaggccgacaaggcggcgaaggctgccgccaaatccggcgccaaggccgacgcaccggcgaccggcgcggcggaggcccagccgtcgaccatcacctccaagatccgctcgctgctggtcggtgccagcgtggtcgtgatcctgctctccactgccaagatggcgatgaacctgctcgacagcagctccgcgccacaggcgccggcgatcgagcagcgcgagccggcggcgcccgccgtgcagccgcccgccgacattcccgtcacccctgcgccgtcggcgcccgccgcgccgggcccatcgatgacctcgccgaccccgctcggccgccagtccaacaacacgccggcgccgaacacgctcgacgccgcgcaggtgacgatccctcaggcccctgcgccggcacccgccgccgcgccggacccggccgtggcgacgcccgcggccgccgccaacgacgtcaccggcagcattccaaccgcgccaccgctcggcggcaagctcgcaacgatccagattccggcgggcgaaaagctgcccgacgcgatcggcggtccggcgctgcgcacggccgcgatcaagggcgatgcggccgcggcctatgaagtcggcgtccgctttgccgagggcaagggcgtgaccgccaacgtcgacgaggccgccaaatggtatggccgcgcggcacaggccggtgtggtgcccgcgatgttccggctcggcaccttctacgagaagggcctcagcgtgaagcgcgacttcgataccgcacggcgcttctatgtgcaggccgccgagcgcggcaacgccaaggcgatgcataacctcgccgtgctcgacgccgatggcggcggcaagggcgccgactacaagagcgccgcgcaatggttccgcaaggcggccgatcgcggcgtcgccgacagccaggtcaatctcggcatcctctatgcccgcggcatcggggtcgaacagaacctcgccgagtccttcaaatggttcagcctcgcggccgcacagggcgacgccgacgccggccacaagcgcgacgatattgccaagcggctcgacccgcagtcactggccgccgccaagcttgcgatccagacctttactcccgaaccgcagccgagcgatgcggtcaacgtgccggccccggccggcggctgggacggcgcccccgcgcagcctgcggcggcgaagccggtcaggcagccgtcgaagcggaccgcggcgctggccgcaccggctcattaaagcgaggctagctgcggcgccgctgtcctgtacctccgccctcctgccgtgtagacaggcgcgtagtcgcgcgccaatcgcgcctgcgttccggagggtcaggcttgtccgtcgacgatcgtcaggatgatggaacgggccatcgttcgtcgccgaccggtccccgcgtcgcgccgccgcgtcagacgccgtctccatttgctgcgcgtcccaacactccgccttcgccgcctccacccgcgcaggtcaacgcggcatcgccgccgcgcaccttccggttctcgctgtggtccgtcgtcatcttcgtgctgctgttgtcgagcgtcgccattcaggcctatcgcgacctgtcgcggccgggtgcctgggatttttggcgcgagacctacatcgcggcgagcatgacgtcggcggtgatatcagacgtcgacatcgacgggtcgggccgcggccggcgcgcgctggcgatcagcggcaagatcggctcggccagtgcgagctggttccgcgaccgcctcagcgaggcgcgtctcgccgccggcgatgccgtgctgctgtcgtcgcagggcggcgcgctgaaccaggccgcgatcatgggcgaggtcatccgcacacacgggctcgtcaccgcggtcgccaccgcagacgcctcgggcaagctgcgccccgcggcctgcgccagtgcctgcgtcctggtctatgccggcggcgcgacccgctacggcatcgccggctcgcggctcggcgtacatcgcttcacgaccagcgcaccggtcagcgatccgcttgccgaggcccaacgcatccagggcatggtgcttggctacatgaccaagatgggcgtctcttccgggatcgtcgaggcgatgtcgcagacctcggatatccgctggctgagcccgaaggaagcgctcgcgctgaacctgatcacgacgccggtcgatcagccctgagccgatacagatgtcattaatctgaattatcaaccacgtgcgcaaccgagcggcaacgtgcggcgaaaaatgccacccggagcggaatctttagtccctcctcccgccgaattcggttatgcaagaacgcggcaatcgacccgcgttcgcctgcgcctcgcgcgccgaccggattcgttcagccggagaatgcccgacccgaacgacatcacgccgtgatgcggccttgcgccccagcatgcggcgaaccgacaagaagcgacgcgcgtgcagctctacctcccgatcgccgacattccggtcaatgtcttcctcatcctggcgatgggcgcggcggtgggattcgtctccggcatgttcgggatcggcggcggcttcctgatgacgccgctcctgatcttcgtcggcatcgcgcccgcggtcgcggtggcctcggtcgccagccacatcgcagcctcctcgttctccggcgcgatctcctattggcgcaggcgcgcgatcgacccgttgctggcggcagtgctgctggtcggaggcacactcggcaccgcgctcggggtgtggaccttcaccttcctgcgctcgctcggccagctcgacctgatgatcgcgctgtcctacgtcatcctgctgacgacggtcggcgggctgatgttctgggaaggcctgcgcgcgatgctgcgcgcccgcggcggacgcccggtcgcgctgcgcaagccgggcagccatggctggatccacggcctcccgctgaagctgcgcttcaagcgctccaagatctatctctcggtcattccggtcgtcgtggtcgggctcgtgatcggcttcatcggggcggtcatgggcatcggcggcggcttcatcctggtgccgctgatgatctatgtgctgcgggtgccgacctcgaccgtgatcggcacctcgatggtgctgaccctcgtgacgatggtgttcgccaccatgctgcacgcggtgaccaaccatctggtcgacgccgtgctggcgctgatcctgatgatcggcggcgtcaccggcgcgcagttcggcgcccgcgccggccagaagatccgcggcgagcacctgcgcctcctgctcggcctgctggtgctcgcggtcggcatccgttttgcggtcgagctggtgatccagccgcaggacctgttcagcatccgcgaaaccggcggagcgccgccatgaggctgtgtgcaccactggccatcgcgggcctcgtcgccgccggcctcgcagccgtgcccgctcgtgcggagcggctgatcgtgtcggtctccaaccaccgtgtcacggtgacgccgaactattccggcggcgagctcgtgctgttcggctcggtcgagaaggacgacaagacgccgcccaatcgcggcaattacgatctcgtggtcaccgtgtcgggcccgcgcgccgacatggtgacacggcgcaaggagcgcaaattcggcatctggatcaacaccgactcgcggcaattcctgcaggtgccgggctatctcgcgctgttctccaatcgcccgttcgaccagatcgccgcaccggaggtgcagcggcggcagcagctcgggctcaacaacgttacgctggtgcagcgggtcgggccggactttgccgacgtggtgccgaacgatccgttccgcagcgccttcgtccggctgcgatccgagcacggcctgtaccgcgaggcgacctcggcagtgacgttcctgaccccgaccttgttccgcaccggcatcccgctgccggccgaggtgccgatcggcacctacaatgtcgagatcaagctgttttccgacggcgcggtggtgaccaagaccgagaccgccttcgagatcgtcaaggtcggcttcgaacagttcgtcgccaccaccgcgcggcagaacggcctggtctatggcttcgtcaccgccttcatggcgctgatgaccggctggatggcctcgatcgtgttccgcaaggactaaagggcgtaggtttgggtggagcgcagcgccacccatcctacggtctctgcaacgtgctctcgaatgcgtcgccgaggatgcacgcccgcaatcctggcacgctcgaccagcctgtcgcgcaggatgatctcgatgaccttgagcccgaccgcggccggcatcggatcggacacatgcgtgaagccgcgttcgtggcagcgctcctcgatttcggccgatgtcgtcgacatccgccccaagcagcaaaccagggaatccttcgaacgtttcgagaagaaggtgatcggccttccggaggtcgtcgagtgctgcatgatcgccggcgactgggattattcgctgcgggtcgtgtcctccgacctcgcaagctatcagtcgttcatcctcgaccgcctgatgcatccggacaccgatatcgcgagctatcgcaccaccatcatcctgcggaaggtcaaatcgacgaccaggatcgacagctcgctgtttcgcagggactagaggagaaacccgatccccatcgcgatcacgctgagcgccatcgcagccgtggagagccagccgagccagtacagccacccgccgatcacgaagcctcccatcacttccctgcggcgtgccatgaccatcagtagcaccatcacgggcacggcgagcacgccgttgacgactgcgctccagtacagcgccgagatcggatcgatcggtgtgaagttgagcgcgatgccgatgccgcccgacagcgccagcaccgaatagaacgcgatcgcctccttcggcttgcgtgccagcccgaccggccatcgacgtccctcgctgaccgcataggccgtcgctcccgcaagcaccgggatcgccagcaggccagtgccaacgatgccgagcgcgaagatcacctcggcaaagggtccggcgatcgggcgtaacgcctcggcggcctgcgccgaggtctggatgtcggtcttgccggccacatgcagcgtggccgcggcagtgacgatgatcgacagcgcgatcaggttggaaaatgccatgccagtgatggtgtcggcgcggatgcgcgagaattcgcgctgcgcgccgtagtgccgcttgatcagcggatgcttgtcgggatcgacccgctgctcctcggcctcctgcgaagcctgccagaaaaacagatagggcgagatcgtggtgccgaggatcgcgacgatggtcgtgaaatagtccgcgctccaggtgacgcgcggcagcaccacgccggccagcacctgtgtccacgacacctgggcaaaggcgagcgccgcgacataggcgaacagactgagcgtcagccatttcaggacgccgacgtagcggtggtaattcatgaatatctgagcgaccaccgacgtcacgccgaacagcacgacatagaggatggccggaccgccgatcagtaacctggttgcgtccgccatcgccgacaggtcggcggcgatgttgacggtgttggcgatgaacagcagcgtcaccaccatagcgaggagccagccgggatagtgcctgcagacattgcccgcaattccgtgcccgctgacacggccgagccgcgccgaaatctcctggatcgcgctcatcagcgggaaggtcagcagcatggtccagccgatgccatagccgagctgcgcgccggcctggctgtaggtgccgataccggacgggtcgtcatcggaggccccggtgatcaggccggggccgagcgccttgaagatgcggctgaagctggacggctggcgccgaggcttttccgccggcgcatcgtcatcttggtcgtggtgcgagatcgtcccttgccgcgtcatgtcccagttccagcgtctgacaacgagccggataccgcctggttcctgcggcgaaacccaagcctctatggccgtggcgaccccgacttgaaggaggcgctggggacagccgcggcggggcgggtcaccagatagatgccgagcgcgaccggaacgatgccgagcagatcgcggaattcgacatgctcgccgagcacgaggtaggcgaacagcatgccgagcggcggcatcaggaagtgataggcgctggcagcggtggcgccgcacaccttcagcagatgaaaccagatcacgtagccgaggatcgagccgccgagcaccaggaaggcgaaggcgccggcgagccgggcgctcggcacgatgtcacctacgctggaaaacgcgaaggcgaacggcatcaccgcaaggcccccggcaatgttctggatgccgttgccgatccacaaattgcccttgggcgcgagcagcttgaacaggatagtgcccgcgacgatcgaggcgagcgaagccagcgtgaacaggacgccgtgcggactgtctgatccgatcgacatgcgatgccagacgatgaaggcgacgccggcgattccgagcagcaggccggcgaccttgcgccaggtcagcgcctcgccgagtaacagcgccgccagcaccgcggtgaacaccggattggccgacacgatcagcgtgccgagaccggcagagaccgtcttcagaccagtgtagccgagaccgagatagagcgcgttgttggcgacgccgagcacggcgaacacgacggcatcgcgccacgtcagatcccatgcgtcccggcgcagcagcgagaccgccaagatcaggatgccggccagcgaaaatcgcgcggcgagcaggatcagcggcgggcaatcggtgacgccgaccttgccggcgacgaaggcgaagctccagagcaggcagaacagcgcgatcagcagcggcagggtgttgaagcggacgcgagggacggcgatcgaagatgcggcggacatggatttctcctggaatttctccatcgcccatgatctaggccgtcgcgttgatatttggaaattaaatgatagactggcttccagtggatttatgaatggagcctgcgatgctcgacctggagctgttgcgcagtttcgtctcggtggtcgatgccggcggcttcacccgcgccggtgagcgcgtccaccgcacgcaatcgacggtgagccagcagatcaagcgcctggaggaggacgtcggccagccgctgttgatccgcagcggcaaggacgtcaccccgaccgaggccggcgaacggctgttgacctatgcgcggcgactgctgtcgctcgcggaggaggcccgcgacgtgctctcgcgccccggcagcgagggcgcgatccggatcggcatcaccgaggactttgccgcctaccgcttgacgagactgcttgcgacgttcgcgcgcagccatccgaatttgcggctcgacgtgcgctccggccagagcctgtatctctaccgcgatctcgagcgcggcgatctcgatctggcgctgatcaagcgcgctgccagcgagaaagccggcatcgcggtgtggccggaacgcgtgcattgggtcaccagcaagagccatccgcgcgacaccacggccggctcggtgccgctgatcggcttcggctcgggctgcctgtaccgcgcccacgccatccatgcgctagagcgcgccggccgcaactggcacatggcctacacctcctccagcctggccggcatccaggccgcggtcgctgcggggctgggcttgagcattctctcggaaatgtcgatccaggccgagcaccgcgtgctgaccgccaaggacggttttgcgccgatcgagcgcaccgaagtcgccctcgtcgccgcccccgaggcccgccccgcgacgttgcggctggccgaccggctcgccgagtattgcgagagtgtgcaggcaaaggcggcttagggtatttatccgtcattccggggcgtgcgaagcacgagcccggaatccattcattcacgaatgatgcggctcaatggattccgggctctcgcttcgcgagccccggaatgacgatgcgaatctaggagcaccgcgacgctgcgaatgcgtggacgcgattgtcgcccagcacatgggccatgaagccgggcgatccgaaaatccgtgcgaacgccgcgtcgcggatgctgaggcccccggtgtaggcgccgaacgccggcatcaccgcgcgctcgccgtcgctggcaaaacagcgccgctcgatcgagcgaccgcgggtcggcacccgcgccttgggatgcaggtgcccggcgatctcgccgctcgcgccggtcggctcgtggcggaacacgatcgggccgattgcgacttcggtcgcgaccacgccgccgagattggacggcagcgccggatcgtgattgccggcgatccagatccagttgcgccgcatttgcaatgccgcgagcgcctcgcggtcggccccggagagacgttcatgcgcctcgcgatcgtgaaaactgtcaccgagcgcgatcacctgccgtggatcgtgccgcgcgatcacggcggcaagccggctcagcgtcgccaccgtgtcgtagggcggcagcaaaacgccgcgggcagcgaagctcgagcctttttccaaatgcaggtctgacaccacgagcaggcgctgttcttcccagaacagcgcgccggaaaaatccgccacaaagccgacatccgccaccatgaccctcgaagcgcgcatgtcgtcaccgtctcgcaaagctggcgcgcttgccgtcacgtcctgttcctcacagcatcagcgttaggttgtcgcctcccgcacgagttcctcggccgcctcggccagaagctcgtcggatgcttcgccataaactgactcgcggccgatttccagcagcgcggggacggcaagcggggaaacgtggtcgagatccttgtgggtgattcggccctggatgcgcgacagcatgtcgccaagacggcgaaggtcgagcaatcccgtggcggcatcgccacgcgcggcacgcagcagcacgtggtcggcctggtgcttgcgcagcacgtcgtagatcaaatcggtcgagaatagcacctggcggcgcgacttctcctcgtcggtgaagcggcgcgcgatcaggccggagatgatcgcgcagttgcggaaggtgcgcttcatcaaggcggattccgcaagccacgcctcgaggtcgtcgccgagcatgtcgggatcgaacagcgcgttgaggtcgagcttgccatgccggatcatgaaggagagatcaccgacaccccagaccgcgagcgcgtattcgttggcgacgaagccgagtggacgggcgcgggcgcgctccagcctgcgcgtcagcagcatgccgagcgtctggtgcgcgagccgcccctcgaacggatagcagacgagataatgactgccgccgcgcggaaaggtttccaccagcagctcgcgcaccgcgggcacgcgggagaatttccgctgcagcgacagccagtcatgcacctggtccggcaatccgttccacgcccggctgttgtcgagcagcttgcgcacgcgttcggcgagataggtcgagagcgggaacttgccgcccatataggacggcacttttgcgtccttgtcattggcgcgagagacgtagacctgatcctcgaccaaggcctcgtagcgcaccacctcaccgccaaagacaaaagtgtcgccgggcaccaggccctcgatgaagacctcctcgatctcaccgagcatccggccgccgcgcgcgatcgcgccggtcgacccggttccgccggcgcgcgagcgcactagccgcaccttcagcatcgtctcctcgacgatggtgccgacgttaaggcggtagctctgccgtaccttgggattggtgacgcgccagcggccctgcttgtcctgcttgatccgcgcgaaacgctcataggtcttcagcgcgtagcctccggtcgcgacgaaatcgacgacgtcgtcaaaatcggtccgcgacagcgatgcgtagggtgccgcggtcctgacctcatcgtagagttcgtcggacaggaacggcttgccgcaggcgcagccgagcacgtgctgggccagcacgtcgagcgcacctaggcgcaacggcggcgtgtcctgcgcattctcggcgatggcatcgatcgcgacacgacattccagcacctcgaaccggttggccggcaccagcacggcgcgcgaagcctcgtcgaagcggtggttggcgcgaccgatccgctgcatcagccgcgacgatcccttgggcgcgccgatattgatgacgaggtcgacatcgccccagtcgacgccgagatccagcgaggaggtacagaccacgccgcgcagttttcccgcagccatcgcgtcttcgaccttgcggcgctgcgcgacgtcgagcgagccgtgatgcagcgcgatcgcgagcccatcgtcgttcatccgccagaggtcctggaacagcatctcggcctggctgcgggtgttgacgaacaccagcgtggtcttgttgcgcttgatcagctcatagacctcgggcagcgcgtgccgcgcgctgtggccggaccacggcagccgctcgcgcgtgtcgagcatctcgaccaccggcggcgcggcaccgccggcagtgacgacgtcggcggatgcgctcgcgccgcccggctgcggcaccaggaagcgcgcgagttgctcgggctcggctacggttgccgagaggccgatggcacgcgcctgtggcgcgatggtccagagccgcgccaggccgagcgacagcagatcgccgcgcttggaggtgaccagcgcgtgcagctcgtcgagcacgatgcgcttcagcgacgagaacaggaacggcgcgtcgtcggacgccagcagcagcgccaactgctccggcgtggtgagcaggatatcaggcggatagcgccgctgccgctgccgtcgcgacaccggcgtatcgccggtgcgggtctcgatccggatcggcaggcccatctcggcaaccggcgtctccagattgcgcgcgatatcgaccgcaagcgccttcagcggcgagatgtagagcgtgtgcagcccgccgctgcggcgaaccccgcggccggtggagacgaggcttcttcttggctccgcagcgctcgctggtagggctccctccctccttgcgggggagggttggggagaggggtaagccgtatcgttcggaacaagcggcatacccctctcccgcaaggggggaggtggcgatcgagtttgtgcgtgtagagtcgttgcgctcgcttcaccgctcagctccaccagcgtcggcaagaaccccgccagcgtcttgccggcacccgtgggcgcgatcagcagcgccgaacgctcctcgcgtgctttcgccagcagcgcaagctgatgctcgcgcggcgaccagccgcgtgaggcgaaccagtcgcgaaactggcgcggcaagagatcggccgtttccgacggcgggacggaaaagagatcgagcgtcgacacgcccaagaggtaggcggttcaggcggcttcgtcgagggcgggacggaaatggcagcagatggcaagggggatgttcgcctccgccacccccaactcgaccgtcattgcgaggagcaaagcgacgaagcaatccatctttccccgaatggatcgatggattgcttcgcttcgctcgcaatgacgggatgggggcgtctgcgccccctactccgtcatcggctcgccggcgaggtcccagtccttgccgttgaagatcgagatgtagagcgtcttcatcggcgtgtagtcgtcgggcgtgtagctgtaattgatgccatcgaggaaatagggcgagtggaagccggccagcgtggtggcgtgcttcagcacgttggcgcgggtcagatcgtcgccgcagcggcgcaggatttcgcccatcgtcgccgcctggccgtagccggcgaaggcgatggtgttgtcaggatcgacgttcggcaggtacttcttgcgcagctcctcgaacgccatcacatcagcatccttctcgtaacgcggcacgccgacttccttgttgtagcggatggcgacgatgtccttggcgttctccagccccgcggcgctcaggatcgagcggccggtcgagcccgccgacaacagctgcaacggcttccagccgagctcggccaccttgcggatcgactgcgacgtcgccttgcctgtggtgatgttgtagaacacgtcggcgcccgacttcgacagattgatcagctgggaatcgaccgtcggatcggtgagatcgtaggtctgctccatgatcacctgggccttgccgccggcgtcagtcagcaccttcttgaacggaccgaggaagtcacggccgaaatcgtcgttctggtagaggatgccgatcttggcgttcggcttcacactgacgacatgcttggcgaggatgcgcgcctcggtcggatagagcggcaggcccgccatggtccatttgaagttcttcgggtcgttccacttcgaggcgccggtattgagcagcaactgcggcacgcccttggaattgagatatttgtgcacggaggtctgcggcgcggtgccgagcgagccatagagcgccagcacctcctcctgctcgaccaggcggcgcgtcgcctcgacgcatttcggcgcgctgtaggcgtcgtccatggtgaggaacttcactttgcggccgttgatgccgcccttgtcgttcagcatctggaaataggcttcgccgacgcggccgagcacgccatagagcgagccggggccggaatgcggcacggtctggccgagcttgatctcggtgtcgcttgcacccggatcgtacttcttgtccgcggcccggacgaacggcgccggcagcacggacgctgcgatcacggacaatgcggtggcgccgaattcgcgccgcgtatgttttttcattgtgtctctccctgaggcgcaaagctctcgcattccgcccagcgccgggcaagcacgaagtcacggcttcgcgacgcaatgccgcgtcacggcaaatgcgtagcgtgtagactcaagttcgggagcgagatgcatgaacatgcaccctctccccttgtgggagagggtggcttcgatgcgagagcatcgaagccgggtgaggggtctgtctccgcggatagagacccctcatccggcgcggattgcatccgcgccaccttctcccacaaggggagaaggtcaagaacgtcacggcttgacggcaactgcgacaagcccaggtgccgggatgttgtcctcgttgcgcgcggagagatcgtcgagcagcgccagtgtcagcccggcggccgcaacggttgcccgcacatgggctgcgctgtgggcgtagcgcagcccctcgccgaggatgacaccctctccgtcatgggtctcggtcgtaaacgcgaacacgccgcccgcgaccagcacgcgcctcgcctcggcgagcacgggcgcgagatcggcgatatagaccatcgcatccgcggcgagaatcaattcggcgctggcatccggcttgccggcaatgccgttgagcatgtcgtcgacctcgagctcggcgtagaggccggtggcgcgcgccttgtcgatcatgcggggcgacaggtcgatcccgatgaagcgatcgacatgccgcgcgaatgcgccggccgcgagcccggtgccgcagccaagatcgatcgcgcgcttgaagaacgccggcttcttcgcggcagcgcgcaccgacagcaccgccttgaacagcagcgccgggccgcgatagccgagatcgccgaccagtgccgcctcgaagcgcggcgcatattgatcgaacagcgtccgcacatagccgggcggcatcgaactgaccggctcgatgccgagctgcatcaaatgcaggccggcgccgtggcggtcctcgggatcggcgtcgcgcgcggcgcggaaggccgcaatcgcggcctcgcgttgcccgagctcgaggcggatcttgcccagcgtgtaccaggccgacggaaatttcggcaccagctcgatcgcctgttcgagcagctcggcagcggccggcaggtcgcccttcaattgcaggtcgcgcgcaaactcgtagcggcggtcggcaacgaggtcgccggaggacaggaacaggcggggcgccattctcttcaaggaaccgatgttgcgacagccccggtcgggccatccatcaaggcacggactttttccggagatggaggcgcgggtcaagcccgggcatgacggctaaacatcgcggtttgaccgcctatataggaccaatgcgctcgcaagacatcctgatgcccgtcccggccgggctttgctgcaagcccggcggcttccacatcgatcctgtcaggccggtcgaacgggcgctgatcacccatggccattccgaccacgcgcggacgggccacggcgcggtgcttgcgacccaggaaacgctcgacatgatgcggctgcgctatggcgagaatttcgccggctccgtgcaggcggtcgcctatggcgaggagatcaggctcggcgacgtcacggtgtcgtttcatcccgccggccacgtgctgggctccgcccagatctcggtcacctgcaaggacaggcgcatcgtcgcctccggcgactacaaggacgcgcgggacccgacctgcgcgccgttcgagctcgtgccctgcgacgtcttcgtcactgaggcgacgtttggattgcctgtgttccgccatggcgatgccgccggcgaggtgaacaagctgctcgcgtccgtcaaactgtttccggagcgtgcgcatctggtcggcgcctattcgctcggcaaggcgcagcgggtgatcgcgctgctgcgcgaggccggctacgacgcgccgatctatctgcatggcgcgatggagaagatcacgtattattatcaggagcgcggcattccgctcggcgagctccggcctgcgcgcggcatgaagaaggccgagcttgccggcaccatcacgctggcgccacccagcgcgacatcggacgtgtggacgcgtcgcttccccgatccggtcaccgccttcgcctcgggctggatgcgggtgcgcgcacgcgcgcgacaaggcggcatcgagctgccgctggtgatctcggatcacgccgactgggacgggctgacggcgacgattgcggccaccggcgccggcgaaatctgggtcacccacggccaggaagacgcgctggtgcattggtgcaagagcaagggccttgccgcgcggccgctcgatctggtcggctatggcgacgaggacgagggtgagaccgcggcagtcaccggcgaaggcgaggccaagcccgacggcgaggcgacatcgtgaaccgctttgccgaactgctcgaccggctcgcctacgagcccggccgcaacaacaagatcaggctgctggtcggctatttccgcgaaaccgaagatccggaccgcggctacgcgctggcggcgctgaccggtgcattgtcgttcaagcacgccaagccgggcttgatccgtgacctgatcaccgaacgcaccgatccggtgctgttcggctattcctatgattacgtcggcgatctctccgagaccgtcgcgttgatgtggccgaaggcgactggcgcatctcacaacgagtctttgctgggctacccctctccccaaccctcccccgcaaggggggagggagcccaaccgtcgtgctcacctcacagcaacgttgtgaccgacatgagtgagggacgcactgttggatgggttccctccccccttgcgggggagggtgagggagaggggtaccgcgggcgagatgtcgccgagactccacgcacgcacaacaacccacctcccccgacgctgaccgacgtcgtcacgacgctgcgcacgctcggcaaggcggagctgccggcgcaactggcgcgctggctggacgagctcgacgagaccgggcgctgggcgctgctgaagctcgtcaccggcgcgatgcggatcgggatctcggctcggctggcgaagaccgctgcggcggcactcggcgacaaggacccgcacgagatcgagctgatgtggcccgggctgtcaccgccctatctcgacttgttcgcatggctcgaaggccgcggcgacaagccggtcaaccgcgatccgaccccgttccgcccggtgatgctggcgcatccgatcgaggatagcgacttcgccaatctcgacgccgccgagttcagcgcggaatggaagtgggacggcatccgcgtgcaggcggtcgccggccgcgacgcgcgcggtcacatccaggcgcggctctattcgcgcaccggcgaggacatcaccggcagcttccccgacctcgtgccctcgctgcatctgcccggcgcggtcgacggcgaattgctggtgctgcgcgacggccgcgtgcagaccttcaacgtcttgcagcagcggctgaaccgcaaagtcgtctcgccgaagctgatcaaggaattcccgatccatctgcgcgcctacgacctgctcggcgacgacgagaacgatctgcgcgagctcccattcactgaacggcgcgcgcatctcgaagccttcgtcgccaggctcggcgatccgcgcatcgacctgtcgccgacggttccgttcgcgagctgggaggaactggccgcggcgcgcgccgatccgaaaagcgccggcgccggcgacgatgccgacgccgtcgagggcgtcatgctgaagcggcgcgacgcgccctatctgccgggacggccgaagggcccatggtggaaatggaagcgcgatccgcacatcatcgacgcggtgctgatgtatgcccagcggggccacggcaaacgctcgtcatactactccgactacacgttcggggtctggacccgcggcgatgcgggcgacgagctggtgccggtcggcaaggcctatttcggcttcaccgacgaggagcttttgcagatcgaccgcttcgtccgccgcaacaccaccgagaagttcggcccggtgcggcatgtcgtgcatgagccggatcaggggctggtgctggaggtcgcgttcgagggcctgcagcgctcgtcgcgtcacaaatccggcgtcgcgatgcgctttccccggatcagccggctgcgctgggacaagccgccgcgcgaggccgaccggctggagacacttgaacggatgttaatctccatgacaggaagttaaacccgcaagccgcatggcagccattgatcgccgctcacggatttcccatgtgctccgccgtgacctataatgcgcggacaattccgccaggagatacagatgccgaacgacgtcagggacttgccggccggaggccagagcgacggcctgtaccgctttctcggcggctcgccgctctcggtggcgttccggctgatcctgctctcgatcctggtcggcgtcgtgctcgccgcgatcggcctcgacccatggaacatcctctacagcgtccgcaggctgttccagaccatctgggatttcggcttcgacgcgatcaactgggcctggcgctacttcctgctcggcgccgtgatcgtgatcccgatctggctgctgtcgcggctgttcggtgcgccgcgcggccggtgatccaagggaaggcccgcagccgatgcaattgcgatttgtcggctgcggcgatgcgttcggctccggcggccgcttcaacacctgcttccacgtcagcagcgagcgcgtcaatttcctgatcgattgcggcgcctcctcgctgccggcgctgaagcggctcgagatcgaccgcgacgcgatcgacctgatcctgatcacgcatttccacggcgaccattttgccggattgccgttcttcctgctcgatgcgcagttctcccgccgcacccggccgctggtgatcgcggggccgcaaggcatcgagacgaaattgcccgaagtgatggaggtgatgttcgagcattcctccaaaaccaggcagcgcttcgacctgtccgtcgtcacgctcgcgccaagggaacggcgcagcttcggcgacgtgaccgtgacgccctaccctgtggtgcatggcgaatccggcgggccgtttctcgcctatcgcgtcgaggcggaaggccgcaccgtctgctatagcgccgacaccgagtggaccgacgcgctgatcccggccgcgcagaacgcagacctcttcatcgccgaagcctacacctacgacagaacggtcaagaaccatctcagcctgaaaacgctggaagcgcatttgccggtcatcaacgcaaggcgagtggtgctgacccatatgagcgacgacgtgctcgctcgcatcgacgagctaccctatgcggccgcgagcgacggcttggtcgtggtgttctgacgacgcaattgcgttgccggctgcccacccccctcgccgccgcattgctctgagcacaattccggcatggtcgcgcgacggacgacgcgctagaagcatacattccttgcaaccgtagccatgcacgcacccatccacccgaagatctccacccgccaggtgttcgccatcgccggccccgcgatggtcgccaatttgaccacgccgctgatcggcatcgtctcgaccaccgcgatcggccgcctcgacgatgctgcgcagctcggcggggtggcgatggcctcggtgatcttcgattgcctgttctggctgttcgctttcctgcgcatgagcacactggccttcaccgcgcaggcgcaaggcgccggcgagccgcaggaatacgccgcgatcctggtgcgcggcttcatcgtcgccggcctgatcggcgccgcgctgatcgcgctgcagctgccgctcgccgcaatcacgttccagctgatgggcggcagcgaaggcgtcacgcgtgcggcgaaaacctatttcatgatccggatctggtcggcgccgctggcgctcgccaattacgtcatcctgggctggctggtcggccaggcgcgcgccaatctggcgctggcgctgcagatcgtgatcaacctgatcaacatgattgcgaccgtgctgctggtgcaggcctatggcgccggcattgccggagccgcgatcgccgccgtgctcgccgagaccgctggtttcgttgtcggcatcgtcgtggcgtggcggatctcgcaaacaggcttcgcggttcccgcggccacgctgttcgatcgcaccaagctgatgcgcatgctggccgtcaaccgcgacatcatggtccgtaccgcggcgctgatcgtcgtgttcctgttcttcaccgccaagggcgcgcgcgagggcgacgtcacgctggcggcgaattcggtgctgaacaacttcctgctggtcagcgccttctttctcgacggcctcgccaacgccgcccagcagctgtgcggccgcgccttcggcgcgcgcgacggacgcggctttgccgattcgacccggctggtgctgctgtggggcatcggctttgcgctggtggtgtcggtgctgttcgcactgttcggaccggcgctgatcaagctgatgacgaccagcgacgacgtgcgccgctatgcgcgcgacttcctgccgttcgtggtcatggcgcccctgcccggcgtgttcgcgttcggcttcgacggcatctatgtcggcgcaacctgggcgcgcgagatgcgcaatctgatgctggcctcgctcgcgatcttcctcgccacctggtgggcgctcagcgcatacggcaacaccggcctgtggatcgctctgatcggcttctacgtcgcccgcggcggcctgcagggcctgcgctatccggcgatgctgcggaagacgttcgctacctcaccggccagtcctcggccgtgatggccgcggcgtcggcgccgacgatttccgacaaagagtcgcgccccgtgcgcagcagggtcgaggacagatcgcgcttgatgtcctcgaccaggccgatgcccttgtagaccagcgaggaatagagctggatcaggctggcgccagcgcggatcttggtcagcgcggcgccgccggaatcgatgccgccgacgccgatcaagggaaaggcgccttcgacacgcacataggtctcggccaccatccgcgtcgagaggcgaaacaacggacggcccgacaggccgccctgctccttggcacgggtttcctcgcgcaaggtcgagggacgcgccagcgtggtgttggcgacgatcatgccgtcgacgccgcgcgagcgagcgatgtgcacgacgtcgtcgagctcggcgaggctcagatccggggcgatcttcagcagcaccggtgaatcgccggcgttcttgcgcacgcgctcgcgggtatcgatcacccgcgccagcaaatcgtcgagcgccgccgattgctgcagattgcgcaggcccggcgtattcggcgaggagacgttgacggtgaaatagctcgcgaccggcgcgaaggtctcgatcagcttcacgtagtcggcaatgcggtcctctgaatccttgttggccccgacattgacgccgacgatgccgccaccgccggcgcgcgcggcgagccgccgcagcacggcttccgcgccgtcattgttgaagcccatgcggttgatgacggcttcgtcgcgctcgaggcgaaacagccgcggccgcggattgccggcctgcggtttcggtgtcaccgagccgatctcgacaaagccgaagccgagccgcaacagcgcgtcaggcacctcggcgctcttgtcgaaccccgccgccatgccgatcggattcggaaagttcagcccgaaggcgcgcaccgcgagcttgggatcatccggccgcagccggaccggcggcagcagtttcaggccctggatcgccatgcgatgggcatcctcgggatcgaaccagcgcagcagcggcagcgagaaggcgtcgaaggcacggatcacggcttgagctccggaacgtcgtggccgccgtcggagcgcgcgcgcaggctcaggatttcggtgaccgcgccgaggtcgagttcgccatagagatgtggaaacagttcgtcattgcgcgaccgctcccaacgcagggcatcgccgagcgcatcggcgtcgaccgcgaccaggaacaggccggtttgtccgtggtaatgcttgcgcgcggtctcggcgacctgcgaggccgtggaaaaatggatgaagccgtcgcgattgtcgtccgcactgccccggtacacgccctgccgctcggcttcgcgccaggccgaagcgggggtgattttatagatcatgggcacggcccggccttcccttttgtccttgagtctcttggggttttatccggatttgaggggaaatgccccagacgccaactggcgagcgagggaccgtatcggcggtagcggcgcaactcaagcggtgccgcgccagatccggcggcagatttgcgaaaatcgaagtttcaggcaataattcctaccatccgggatatcctcgatggccaaacagtccaaagccgcccgaccgctgacccacgctcaggtctgggccgcgctcgaccggctcgccgaacgcgccggcctgtcaccgtccggacttgccaagcagtccggcctcgatcccaccacgttcaacaagtccaagcgcgtgaccggcgacggccgcgagcgctggccatcgaccgaatcgctctccaaggcgctggccgcgagcaacgccagcatggagaccttcgtgcagctgctcggcgacggcccgcgcggcggccagtcggtgccgctgctcggcttcgcgcaggccggcgccggcggctatttcgacgactcaggttttcccgccggcaagggctgggacgaggtggcgctgccggcaacgtcagacgagcacgcctatgcgctcgagatcgacggcgactcgatgaagccggcctatcgcgaaggcgacatcatcgtggtgtcgccggcaaccgcgatccgccgcggcgaccgcgtcgtggtgcgcaccaccggcggcgaggtgatggtgaaggagttgaagcgccgcaccggcaaggtgctggagctcgcctcgctcaatccggagcaccccgaccgcatgctcgatgccgaggaggtcgcgtggatcgcgcgggtggtgtgggcgagccagtagcaggcgatgcagtcaccacacaatcggtgtcgtcccggcgcaggccgggacccataaccaccgcatagcactgcttacgcacgctgaggccgcaacctgcccaaccaacccagccctgtggttgggtcccggctttcgccgggacgacggcggagtttgacgcgaactacgtcgcgtagtccggctccttgcggtccagcatccgcttcagcgcatcgaaatgccgctgcgacgggcttgggcccctgtagaggtgatcgtcgcggaaatcgcgcttggtcttttccaccacatgctgcggcaattgcttgagcggctgctgggtccacatcgcgtagatctgcacctgcgcggcgcgctcgatgtagtagagccgatcataggcatcggcgacggtcgcgccgacggtcgagatgccgtgattggccatgaacaggatggtcttgttgccgatcaccttggcgagccgcgcaccttccgcagggtcgagcgcagggccggtatagaggtcgtcataggcgatcgcctccgacagtccgacctcggtctggccgatctccttgatgcgaggatcctcgagccgcgtcagcgcgctcgcatacggcatgtgggtgtggaacaccgccttggcttgcggcagcgccttgtggatcggcgcgtggatgcaatagcaggagcgctcgacctcaccctcgccgcgcttcacctcggcatcgtcgataccgacctccatgaaggacgacgcagtcacctccgaccagtgcatgccgaacgggatctggtagtagcggtcgctgcggccgggcactacgaaggtgagatggttgaagatgccttccgaaaagccgtggatgtaggcgagccgatgcgccgcggcgagatcgacccgcgcctgccattcctcggcgctcgtactgtcctgcagcgatgtcggcgaaaccctgaactgcatgcgcgcgctcccatctgtgccggccgctctgcggaggccgtgctgattttatggagccagtgtagcgcagtccgccgcagacctccggtgaaattgccggggatcagccatccgcattttgcggctctttgtccctcccctcgcggggaggaacggaagtttacgacgaccgcgccagcgcaccgtcgatcatgttgaccgcgttctgcacaccatagaccgcgacgaaggagccgaagcgcgggcccttctcctggccgagcagcacctggtagagcatgttgaaccagtcgagcgacacgcccggacggccgtccttgcccttcttgaccatgtcgaggaacggctcgcggcggccgatctcgtagaccacgttctggatatcttccgcggtcgcatcagcttgcatgttggcgagcgcatcgcgcaggtcctgcaacgcggcgcgttcaccctcggtcggttcgcggaactgcttggtcggcgccacgaagtcgcgataatagttgatggcgtagccgaccattgcatcgagcttcggatgggtctcgggcgtcacacccggccgatagcggccgatgaagccccacagcgtctcggcattttccgcattcgacgacgacaccagcgtcagcagcagctggaaggtgaccggcatgtcggcctgcggcggcttgccggaatggatgtgccagaccggattctgcagctgctgtcgcggttcctggcgcgtgaagccatcgaggaactgctggtagtcgtcgacattgcgcgggatgacgtcgaaatagagccgcttcgccgccttgggctcgcgatacatgaacagcgacagcgattccggcgaggcatagcgcagccactcgtcgatggtcaggccattgcccttcgacttcgagatcttctggcccttctcgtcgaggaacagttcatagttgaagccttccggcggcgtgccgccgagcgccgcgcagatcttcgccgacagcttcaccgagtcgatcaggtccttgccggccatttcatagtcgacgccgagcgcgtaccagcgcatcgcccagtccggcttccattgcagcttgcagcggccgccggtgaccgggacggtgacgctctccttggtgtcgggatcttcataggagatcgtgccggccttggcgtcgtgcgcggtcaccggcacgtagagcacgagaccggtgcgcggacagatcggcaggaacggcgaatagctcgcggcgcgctcctcacgcagcgagggtagcatgatcgccatcaccttctcgatccgctccagcatccgcagcaacgcggcatcgaaccggcccgaggtgtagtattcggtcgagctcgcgaactcgtagtcgaagccgaactgatcgaggaaggcgcgcagacgcgcattgttgtgctggccgaagctcgggtgggtgccgaacggatcgggcaccttggtcagcggcttgccgagatgctgttgcagcagctccttgttcggcacgttgtccggcaccttgcgcaggccgtccatgtcgtcggagaaggcaagcagccgcgtcttgatcttgtcctcggtgagcacgcggaaggcatggcgcaccatcgtggtgcgcgcgacctcgccgaaggtgccgatatgcggcaggcccgaggggccgtagccggtctcgaacagcacttcgtccttcggatttttcttcagccgcgccacaatcgctttcgcctgctcgaacggccaggcgttggattgttcggcgagcgcccgcaggtcgctcgggctggcggcaagatcaatcacggacatttcttcgagctttctccaaaaaggccgcgaaacctaacgctttcgcggcaaaatgcaaaacgacgggagtctcgagattccgggttcgatgcttcgcttcgccccggaatgacggagctagaacgggctgatcgagaaatagcgcagccacaggtcggtgaagcggcctttttcccagatccggaacagcgcccagttcagcgactgccgcagcaggtcgttgcccttgcgcacggcgatgccgacgccctcgccgaaatagcggctctcgacaaaggggccgccggagaacgcgcagcattcggcggaatcggtgccgttgatccagaacgccagcgagatcgcatcgccgaagatgaagtcgacctcgccgcggcgcagcgccgcgcgcagcgcatcgttatccggataggaatggatctcggcgtcggtgaacatcgccttgaggtaggcctcgtgcgaagtgcctccgatgacgccgaccttcttgccctcgagatattccgggcggatttccggcatcacattgtcgcggcgcgacacgaagcgcgccggcgcgcggtaatagggatcggtgaaatcgaccttggcgcgcagctgcggcgtcaccgccatcgaggcgatgatggcgtcgccccggttggtggcgagcgcatcgatcagggtctcgaagcggcgcatctggatagtgcaggtgaccttgatctcgtcgcagagcgcgcgcgccagatcgacgttgaagccggccggattgccgtccggaccggtgaagttgaacggcggataatcggtctcggtcaggaagcggatcacggtgagccgcgacaggtccggccgatccggccggcgccgcgggtcccagaagcccggcaccgcctgcggcgcagcctcggcggccttgggcggctgattcggctgcgacggggcagctgccgccgggggcgccgctggtgccggggcaggccttgcgggcggaggcggcgcagcggccggcttggccgctggcgcctgcggtggctgtgccggtggtgtctgtgcgaccgcgggctccgccatcaccagcacgacggcggcaatcatccccgcggccaggcgaagctggcgcgagcggacggcaaaaggctgggcggacggattgggcataaccggcaataatcagggaattgaacggcttatagaccatccggcgcgtgatgcgagcgccgattgggcgaatcccgaaccggaaagggcggtcagagataccgtttgagatcgaccgccgcctcttcgggcgtccgtttcagattgaacggcgcgacgaaatggccgtcgcggtccatcagatagatcagcgcggtgtgatccatcgtgtagtcgccatccttcagcggcaccttcttggcgtagacgcgatagctcgacagcaccttggcgatcgctgtgggatcgccggtcaggcccttgaggtgcggatcgaagctcgacagatagtccttcatcgccgcagcggtgtcgcgttccggatcgaccgaaacgaaataggcgttcacgcggtcggcgtccttgcccatcgccttcaggacctcggaaatctcgaacaacgaggtcgggcagatgtccgggcaatgggtgaagccgaagaagatcagcgtcggcttgccctggaggttcttgtcggtgacggtctggccggactgatcggtgagctggaacggcccgccgatcgcggccggcgctgcgacggtgcgcaagccgccgactgcccacagcatgaggaacaggccgaccgccagactgcccgcgaaggcagcgaagatcaccaatgggcgcgtggtccgggtcatggtgtgagggcgtccttgtcagaagcaggcggagatgccggccgtgatcatttcgaaaaacaccgcggtcccgtagtggaaccagagcgcggcagcggcgagcaaggccaatccgccgatgccggcagcgccccacaggatcatcgacgccacccggccctgcagagccgtcacgtgctcggatcgggtggagatcggctgaaccatccggttcagataagccgggttccccaaggcagcaagcgctatggcggtcgcgggccgtcaaatgatagcgagccgatttccgctgcctgtcccatcatgccccaggttaccggccatgcgcgaaaggacgttaggccgagatcggccgctcagtgcgcgggtttgggcgccgaagcctgggcgttgagatagcacggcttgtacagcgcctgcagctgcttgccttgcaggaagatcatccgccgggtcaggccgccgcgatcgttgatccatttgcgcaccgccggcgggtacatcaggtacagcatatgggtggcttcggggttgggcaccggccggccgttgtcgccgtaatcccaggcggcatggaagccgagactggcgtgcgaggtcacacagatccggtcatgaggaaccttgccgagcacgatggtgcaggccgaggcgcacagcccgtcgatgatcacggtctcacccgacgtgcgcaggtcctggtacttgtcgacatagaccccgatcttgccgccgcgatcgtcggcgatcctgaccactgcttgtgacgcccccattcccgccagcaggagaaccgccgcgagcaaccccgtcatcaacttcattggccagccccagtccaaaccgaatctgttggtcttgtgatgcagacggcgtgagcgtgttgcgagactggatttttgtccagacgagcgaagccggtcaaaacaaaatcaaattgggtgttgcgcgcacgctgcagtggcgcgtggaaaaggtcccaaaccggaacaacttgccgcaaccatttgatgccttgccgccacaggcaaggtccatttggcgttgaccgcgaacagtgacgcggtcttgaatcgcggcgggacgggggacaccaaaatggctgacgatgcagatgtgatcgtgatcggcgccggacttgccggcctggtcgccgcaaccgagatcgccgacgcaggcaagcgcgtcatcgtgctcgatcaggaaggggaacagagcatcggcggccaggctttctggtcgttcggcggattgttcctggtcgattcgccggaacagcgccggctcggcatcaaggattcgatcgacctcgcgctgcaggactggatgggcaccgcgggttttgatcgtgacgaggatcactggccgcgcaaatgggcggaggcctatgtcgcattcgcggcgggcgagaaacgcgactggctgcgcgcgatgggccatcgcatcttccccgtcgtcggctgggccgagcgcggcggctacgacgccatgggccacggcaattcggtgccgcgctttcacgtcacctggggcaccggccccggcatcgtcgagccgttcgagcgccgcgcgcgcgaggccgccaggagcggactgctggtgttcaagttccgccatcgcgtcgatgcgctcagcgtcagcaacggcacggtcgacggcgtcagcggcgccatcctggaaccgagttcggtcgagcgcggcaagagctcctcgcgcaatgtggtcggcgatttcacgctgcgcgcgcaggctgtcatcgtcgcctccggcggcatcggcggcaatcacgacctggtgcggcaaaactggccgcggcggctcggcgaaccgccgaagttcatgatctccggcgtgcccgaacatgtcgacggccgcatgatcgggatcaccgaggccgcgggcgggcggctgatcaaccgcgaccgcatgtggcactatgtcgagggcatccagaactggaacccgatctggccgcgtcacggcatccggattctgcccgggccgtcgtcgatgtggttcgacgcatcaggcaagcggctgccggcgccgctgttcccgggctccgacacgctcgggcagctgcattacatcatgggcaccggctacgattattcgtggttcatcctgacccagagcatcatcaagaaggagttcgcgctgtcaggctccgaacagaaccctgatctgaccggcaagagctggcgcatgacgatcaagcgcgccaccaacaagggcgcgccggcgccggtcgaagccttcaagcagcatggcgccgacttcatcgtgcgcgacaacctcgccgacctcgtcgctgccatgaacaagctcgccggcaatgacctgttgcagcccgacgctatcaaggcgcagatcgaggcgcgcgaccgcgagatcaccaacccctatgtcaaggatgcgcaggtgatgaacctgcacaatgcgcggcgctatatcggcgaccggctgatccggaccgccaagccgcaccgcatcctcgatcccgagcacggcccgctgatcgcagtgaagctcaacatcctgacccgcaagacgctcggcggcttcgagacggatctcgattcacgcgtattcggcaacgatcaccagatcataagcgggctctatgccgccggtgaagccgccggcttcggcggcggtggcgtgcacggctatcgctcgctggaggggacgttcctcggcggctgcctgttctccggccgcaacgccgggcgcgcggcggcgaaggcggtgggttaggcacgcgggcttaaaatatcgaaaacaaccccatgcaaaggagccgctggcgttcggtcaggcaccgagcgaccgagcgacttgacacgtcgggcaactcaggtgcattcttctaatattcagaaattgcgcaaagtgtccctcgccccgcggccacagcccgatctcatcttgccctactccacctccacgctggcgaagcgcaccccgaacgtgtccgcattcgcctcgccccaatcgtacagcgcctgcagcatcggcttcagcatctcgccgcgcctggtgaggcaatagcgcgaggcgccgccgccgcgctcctgcttgacgaaccccgagttgcagagatcgcgcaggcgctcggtcaagaccttgtcactgagctgcggaatgtcgtggcgcaactcgccgtagcgcatcgggcggaccttgaggcggctcaggatcacggtcttccatttgccgctgagctggtcgatcgagaactcgaccgggcaaccatatttgcgcttggtcttgcggatcatcgcaactctcctgcggcactttccatctggttcgttgagcgccgccatcgatccatctaagcacgctttgcgcgggttgggcgagttcagggaatactgcaaggcatgacagaagacagttccgtcgagcgtgcgaacgacaagcagaagccgcgcaagcgcatcgtcgtcagaagcaacggtccctacgaagccgagcccggcattgcgatcgtcgatcatctcggtgtgcctgttgcagccgaggcgccggtgcggctgtgccgctgcggacaatcgcagacaaagccgttctgcgacgacagccacgtcgcgcgcggcttcaccgacggcagggatccgcggcgggtgcccgacaagctcgacgtccatgcgggacaacaagcctatgtgttcgacaatcgcggcacctgcgcgcattccggcttttgcaccgaccggctcaattccgtgtttcatctcggcgaggagcctttcatcgcgccaagcggggcgcgtctggatgatctcatcaacgcggtgcgcaggtgtccgtcgggcgcactcggcatcggcattggtcccgcgcgggacaccaacctgtccgacgtcgaccggccgccgcagatcgaagtgtcgaaggacggcccctatcggctcaccggccatgtcgaactggtcggtgaggatggcgcgccgatcgcacgaaacgaaggtgcgtcgcaggaacatgccagcctgtgccgctgcggttcatcgctgaacaaaccgttctgcagcggcatgcactggaatgtcgattttcacgatcccgtccccgatcccttgcgcgagccgacgctgttcgaatgggctggcggctatccggcgctgctcgacatgacgcgcatcttctacagccgctacgtgccggaggatccgctgctcggcccgctgttcgccgagatgtcgccggaccatccggaacgggtcgcggcctggctgagcgaagtgttcggtggcccgcgcttctataccgaacgctatggcggctatcggcggatggtgtcgcaacatatcggcaaggagatccggccggagcagcgcgcgctgtgggccacctacatggtgcagagcgccgacgacgccggcttgccatccgatccggaattccgcgccgccttcgtcgcctatatcgaatggggctcgcggatcgcggtggagaattccggcgccgacgcgacaccgccgccgaacatgccggtgccgcgctggtggtgggtctgcaacgcgacgcccgcggcgcgaccatccgccatcgcagacgatgcgcagggcgcgaacgaggtcagcgtcgtgctgccgggtcccgatgaagaggtgcaattcgaacagcacatccggccgctgttccggccgatggaccgcaattcgatgctgttcgctttcgatctctggaaggaggaagacgtcagcaagcacagtcggcagattctggctcgcctcgaggccggcacgatgccgtgcgatggcgcgtggccggccgagcggatcgccctgttcgcgcgctgggcgttccagccgcattcgtgacaacgcgattgcgccgaggtgatctcggtgcaattcaggcgatttccgtgagccgtgctgcaaattgcgcagtggcggcggacgcgccggcaggctagagagtttccgccattcaagtggagacccaaatgagcattcagcgtttcgaaaccggcccgcgcatgagccaggctgtcgtacacggcaacaccgtctatctggccggcgtcgtcgccggcaaggcggcgggcggcagcgtcaccgaccagaccaaggacatcctgtcgatcatcgacggccatctcgccaaggccggcaccgacaagtcgaagctcctcagcgcgaccatctacatcaccgacatgaagaccttcccggagatgaacgcggtgtgggatggctgggtctccgcgggcaacaccccggcccgtgccaccgtcgaggccaagcttgcggcgccccagtacaatgtcgagatcatggtcgtcgcggccaagtaagcgcgacaagtaagcgcgacatcgcgatggacgttcgatgccccggattgcgaaaccgcagttcggggcattttcatttggcgcctcacgcgctgatccgcgctcgcccgcctgtggcctcgtcgagatcggactgaagccagcgtgcaatccggcgccacgggccggtcagggccatgcagccgacgaacaggccgagatggccgcacggctcggtgtcgcattgcaaccatgcgggcggcgtgcccaggagccgcattgtcgcgaatgcctgatcaggcggaacaacgatgtccttctccgcagcgagcaggaagacgggcaaggtcactgcggcaagatcgatcttgcgaccgagcgcaacgaagtctccggccgcgatccggttctggcgaaagatccagtcggtcacttcgaggtagtaggtgccgggcagatcaagcgtctcgtcgttccagcgcgtaaagcgatcgagcaggacccgcgcatcctccgacttgccgtcgagccgccgctgcagcgcagcctccacgtcaagcaggttgaacgggaggctccagacctgaagcatgtgctcgccgctgacgatcccttcaccctgccgcaccattgcctcgaaggattgctgcgggagcgaggcgaccatcctggaaagctccgacggcaccgacacgtcaaccgggctgcccgcaagcaccagccgccgcaccttgtcgggaaagcgcgccgcatagagcagtgacagccatcctccctgacagagacctgcgaggtcgacgggtggtccgatggtgtcaacggcgacgttgagatcggacagaaaggtgtcaatcgagaaataccgcatctccggcgtcgccgagcgccaatcggtgagatagagacgtgcagtaccggcctcctgcaacgccgccatcaggctgtggccgtgtgcaagatccgcgatcttcgcgcggtgcagcgcgtagggcgcgcagaccagcagcggcgggccctcgaccgcgctcgagaagtcgagcaggcgcatcgtcggcaattgcagcgcgacggaattggccgtcgtccagggcagttcctgttcgtctgacgcatctgtgggctcggccgggcgatccgggtaccattgtgaggagatgtccagcgccaatcgcatggcctcaaacggccatagccaagcgtgctgcacccagttggtgctgccactccgttcagaggggtctgctttttcgcgcaagctcattcaccgattgatcgccgaccaagatggtcaggccggcgcaggtctaaaccttgaccccgatcaagaaccgacgaattaaggtcgaacaccttacgtcaaccagccggaacggaagccatgccgggaagtcacgatctcgcgatcccggcgcgactttggcggggcgcggacagccggcgccgccgcgatcatgcggcccgtgccgttgccttctccgtatcgagccggcgcgcgaacagccagcggaaataggtcaacggcgcgtcggcgccgatcgccagcaactgataatccggatcggcatcgagcaccttctgctgcgcctcgatgaagtccttgtcctcgttgaaggcctcctcgagcgaatgccgcagcgacagcgcgatgttcgcgttgtcggtgtcgaaatcgtgcagatagttccagaagaagtgcgttgaggagcgcgtctccggggtcatgaactgcgcgttgcggtattgccgggtgcccggcacctgaacgcccttctccgcgccctgcccggccggcgcgaacatcgtgtcgagcgtgaagatacccggcacgatcatgcggccgacattgcggcgatcgaccatgtcggctttgttcgggatcaccttcttgtggtagggcggcgcatcggcgcccatgtgccagcgctcgacgcggaaaccgtcctccagcttctcgatcgcgaccggcttggtcttgtaggcatattcctcggaaccgccgagcgtgttggtgtgcacgaaagcgagatgcgcgaagtcgctgaggttgtcgacgatcaggagccagttggccttgtagtgcatatagcccggcaggccgcgccatttgggatcttcgagcggcggatagtcgaggatcagcttcggatcggccttctccggatcgccggtccagatgaagatcatgttgtagcgctcgaccacgggatagctgcgcacgccgagcttggcggggatcgcgtcctggccggggatctggatgcacttgccgtcggccgcgaacttcatgccgtgatacatgcacctgatgtcgtcgccctcgacccgtcccatcgagagcggcgccgcgcgatggcagcaacggtcgtcgagcgcgacgacctttccgctggcgccgcgatagatcacgatcggccgctccaggatggtgcgcgccagcttcttgccgtcgatcagctcgtggttcagcgccgccacgtaccaggcgttgcgcaggaaaatcccgtcgtcgtcagccaattcaccctcccgatgcaatattgcttgcaacgaggttaggggattgcggccgccgggataatccgatttggctggacacactgtaccggtggatggacaatcggccatggagtggcgtgactgggagctgttttgcgaagttgtcgagcatggcggcttcagtgcggctgcgcgcgtgctcggtcaccccaagtcgagccttagtgctgcggtgcaacggctcgaggccaatctcgggctgcggctgatcgagcggaccacgcggcatttgcggctgaccgattccggcgagacgatctatcgcaaggtgcgtccgctgttcgcggcgctgcacgacacccacagcgaggcgctggcgatgtcgagcgcggtcgccggcacgctgcgcatcaaggcgccgtacgaattcggcgcgcatcacgcggggccggtcgcctgcgcggtgatgggccgctatccggagctcgcgatccgcgatcgatgtcgagcacgatatcgtcaacccgatcgcggagaactacgacatcgtgttcgcgatgctggaggcgccgctgccgtcggccggcatcgtgatccggcgcgtcttcaccctcgagcgcggcctgttcgcggcgccggcgctgctggagaagttcggcgagccgcgcacactggacgagctgagacagctgccacttctgacgggtcccagcgatccgcgatgggcgatcaccgcacccggcggcgccgtcgagcatctcgcggtcgatcgcgcgcgtctcacctcttcgaatgctcatgtccgcctgcaagccgcgctcgccggccatggcgtgctgcgggtgaccgcgagctacacccgcgccgcagtcgcggccggccagttgcggcggctgttgccggaccacgcctgcgagccgctcaacgtgcacgcgctgctgccggcgcggcaattcgtcccggccaaggtgcgctgcttcctcgatgcgatggaggcgcacgcgcgcggcgatcccgaggcctatatcaggccataggccgcgccgccgtcacgcgcgcgatgacgtcagaggtaatcgatcgacgcctgcaaaccttcgatagtccggacagccgcttaaggacggcacttgagaaggagagcaccatgaccgaccatgccaccgtcgcccgcaactacatcgcgctctggaacgagcggacgccgagccggcgccgcgagatgctgagcacaaactggaccagtgatgcgcgctatgtcgatccgctgatgagcggcgacggccatgagggcgtcgatgcgctgatcgccggcgtgcagcagaagtttccggacttcaccttcaagctgatcggcgagccgaacggcttcggcgaccacgtccgcttctcctggggcctcgggcccgacggcgtcgacagcccgatcaagggcaccgacttcgccctgctgaaggacggccggatcaggagcatcaccggcttcctcgaccaggtgccgggggcctaacggcttcttcaggtaaaccgcgacctacatcctctcgtcattccggggcgacgcgcagcgtcgagcccggaatccatcgggccacaaggcctgcggcgaaatggattccgggctctcgcttcgcgagctccggaatgacgggggggaccgcttccacccccgcaatcccgctgctagtcttcccgaaacacagggaggaccaccatgaaggccgatcacgccttcaacacgtcggtcgtcagcgacatcacgccggcgctgctggcgattggccgcgacagctttgcggaggccctgatcgacacgctacgccgggtcgccggggtcggtcactgcatggtgttctcgttcacgggcccgcggtccgccgcgtgcctgctcgacgtcggcaacatcccgaccgggcgcgacctcgggatcgcctattccgagcatttccaccaggccgatccgaatcgtgacgcggtgttcgaggggcaggcacaggccacgccgatcatgctgccgaccttcgcccgccgcatgtacagcgacggttatcgcaagatcttcttcgacgattccgacatcgtcgacaagttcgcttccgcgatctggaccggcgacacctgcttctacgtcaatttctaccagatcaccgcgcaagggcgcttcagccgcgcgcagatcgcgcgcctcgccgcagtggcgcccgcgttgaccgctgccgtggcacggcacttccagcgcgacgcggcagcggatgtcgatcccattgagcggttgaagaccctgtttgcgaccacagagccgctcgcccggctgaccgggcgcgagcaggaggtctgccttcgcatcctctcgggcctcagctcggaggcgatcgcagccagcctcggcatcgggctgcactccgccctcacctatcgcaagcgcgcctatgacaagctcggcatctcctcgcaaaacgagctgttcgcgatcgcgctgcggctgacggcctcagtacgccagctgaactgacgccccgcgctaaagttgccgctgcgccggttgcgtcgtcttgcgcgaccatgccgccattattctctgctgtcattccccgcgaaagcggggaatccagtacgccgcggcctctcaatcgacaatgactgcctctggaatactggatcgcccgatcaagtcgggcgatgacggtgtgtgtcccaaatcatggggacagaccggatgggcatggcggattatgctcgttgagaacctgaggccatacaccgtgagcaccgctccccatttcgacatcgacgtccccgccttctggcaggacccctatccgaccttggcgcgcatgcgcaaacaagcgccgatcgcgttcgtgccgcagctcggcagcacgctgctgtgcaaccgcgacgacatcttcatctgcgagaagcagatcgacgtgttctcgtcgcaccagcccgaggggctgatgaacaggctgatgggccataacatgatgcgcaaggacggcgacgcgcacatgaacgagcgcaaggcgatcttcccgacgatctcaccgaagaccgtcaaatcgcactggaccgcgcagttcgccggacacgcgacgcgcatcctcgacgaactgaagccggacggcgtcgtcgatttcgtgcaggccttcgcgctgccgttctcggctgagtgcctgaaatcgatcaccggcctcaccaacatgcgcttccaggacatgaacgcgtggtcgcagggcatgatcgacggcatcgcgaactacgtcggcgatcccgcgatcgaggcgcgctgccatgccgcgacctcgggcatcgacgccgcgatcgacgagatggctccaaggctgcgcaaggcccccgacctcagcctgctcggcgtgctgctgcagaccgacatgccgatggcgagcgtgcgcgccaacatcaagcttgcgatctcgggcggccagaacgagccgcgtgatgcgatcgcaggcaccgtgtgggcgctgctgacccatcccgatcagctggcgctggcgactgatggcgcgatcccgtggctgcaggtgttcgaggaatatgcgcgctggatctcgccgatcgggatgtcgccgcggcggatcgccaaaccctggacgatccgggatgtcgcattcgaaaccaacgaacgcgtattcctgatgttcggctcggcgaaccgcgacgagaagcatttcagcgagcccgaccgcttcgacatccgccgcgacgccagcaagagcatcgcgttcggcgccggcccgcatttctgcgccggcgcctgggcctcgcgcgccatggtcgccgacgtcgcgctgcccgcgatcttcaccaggctgacgaacctgcgcctgatcgaggaccggccgccgcggatcggcggctgggcgttccgcggcctgctggatctgccggtgacgtgggaccggtagagcgcgccgaaagcaccagccatttattgtttcaaaacagcagcatagataaacaaagacacagaaacacgcggcttgggcggccgctttggatgctctctcgacccgcaattgcgcgtcttgctgcgctgcgacaccgtgccgccgcagccggtcggacgactgtaatcaaactgtcatgaatccatttcaatccgccgttattggtgaaactgcagttagttgagcggtcacaagggatttccgatgaacccgaaccacaatggtagcagtcacgataccgccttccacaacgaggcccccgagcaggagtccgaggagggtggcggcatcaacaagacggttgcggtcgtcgcggtggtggctgtcggtgctgcggtgttcgaagctgccttgctgccgggacttgcactcggcgttgccgcagtcgcggcgccgaagtacctgccgaagctggcgggcgcactcaatccgctgttcaagtccaccgttcgcggcacctacaagttcgcccagaagtcgcgcgagatgtttgccgaggcccatgagcaggtcaacgacatcgttgccgaagtgaaggccgagagcaaggcgccggaaagcaagacggcggcagacggccgggcgtcgcctgcggcctgaacgggccggacgggcagacacaagacggcgaagcgcgccggtgatcaaccttgcgacgccggcgctgcaggcaatttgacgacggcatcattcgcgtccccgcgccggcgttggaacgctgtgagaggaatgcgatgaccaagatgaagctgcagattgcgcatcaggttccgggccggattcgcatgaaggtgccgtcggccaaggagaaccccgagcttcttgaacagatcaagcagaccttcagcgtcattcccggcatcgaggaagtcctggtcaacccggcgaccggcagcatcgtgctgcactacgacaccgaccggcatgacgagtttcacggccggctgcagcatcacaccggcggtcactacaagccgccgaccaatgaaattgacgcgctggcgaacaagatcgaacaggaagccgagtatctcgccgagcattcgcacacggccagggtcattgtcgacttcttcaaggacttcgacaacgggatcaaggtctccaccgggaacgtgatcgatctgaagatcgtgctggcagccggcatcgccggcttcaccatcttcgaggtcggcgccaccgcggcgacgccggtttgggtcacgctggcagtgtttgccctcaaccacatgatccaggccaacatgcgtgacgccgagcaggcggagccggcaggcgcgacggcctgatccgccaggggcgagagcgtaatccatggacttccgcttctgccactccatgccagggcgcatccgtctgagcattcccgcgctcggccaaaatcgcaagctgggcgagatctgcctcggctggctgcgggcgcaggacggcatcaggaccgcgcggatcaactacgactgcgcgagcctcgtgctggaatacgatccggctcacgagcaaagactgctgttgctgctgaacagcttcaagcgcatgagcctggccgacctcaaggcgctgggcgccggcgccgcgcaggatgcgggcgcgcaacgcgccagcgtcccggaggtctcgaagcgttcgcccctggcgttgccgacgctgtccctgttcatggctttgagcgccaatccggtgatcacggcgatcaacatgccgctgatgctctggaatgcgatcccgatcgccaagcgcgcctggaaggtctgggcgaacgagagccggctgaacatcgacgtgctcgatacgctcgcgatcagcgcgtcggtgctccagggcaacccgctggccggctgcatcgtcacctggctgatcaagctcggcgactggatccgcgacctgaccgctgcgggctcgcgacgggcgatcaacgagctgctcgaattccagtcgaagacggcctggctgctgcgcgacggcgaggtggtgtcgattcccgccgccgagctcaagaacggcgacatcgtcgtggtgtatcccggcgagatgatcccggtcgacggcgagatcatcgacggctccgccaccatcgaccagaagacgatcaccggcgagggcctgccggtgcatcgcggcaagggcgaagcggccttcgccgctaccgtcatccgcgagggccagatcacgttgcgtgccttgcgcgtcgggacggcgaccaccgccggccagatcgtgcggttgatcgaatccgcgccgatcggcgacacccgcatgcagaaccatgccgaacgcttcgccgaccggctcgtcaccccgaccctggcgctcgccaccggcaccgccatggtctccggcgacttcaatcgcttcctctcgctcgtcatcgtcgactacggcaccggcattcgcgtcgccgcccctacatccgtgctgtcctcgatgacgctggccgcccgcaccggcatgatcatcaagagcggcggccacatggagaagctcgccgggatcgacaccatggtgttcgacaagaccggcacactgacccacggcacgccggcggtcatcgatgtgatctcctatcagaagtacatcacgccgaaccacctgctcgggctcgccgcggcggccgagaccaagctgcaacatccggtcgccgaggcgttgcgcagccgcgcccgccagctcgccgtcaacatcccgccgtgcaacgagaccacctaccgtctcggcctcggcgtcgagggccaggtcaacggctactatgtccatgtcggcaatcagcgcttcatgcgccagagcgagatcatcgtcgacgccgcggtgcatgatcgcgcggcgctcgacgagcgcggctattcgagcctctacatcgccgtggacggcaagctcgcgggcctcgtgccttactctgacgagatccgcgaggagagccgtccggtgatccagcggctgcatgagctgggcgtcaagaacagcatcatgctgaccggcgacaatgccgtcgtggcgcgggccgtctgcaaccggctggggctcaccgagcacttcgcggacatgctgccggccgacaaggccggcgtcatccaggagctgcagcgccagggccgccgggtcgccatggtcggcgacggcatcaacgattcgccggcgctcagcttcgccgatgtcggaatcgccatgaagcacggcgccgaagtcacgcacgaatccgccgacgtcatcctgatggaagattcgctgtggaagctcgtcaaggcggtcgagatctcgcaaggcgcggtcagcctcatcaagcagaactacgcgatcgtcgccgcgctcaacacgctggcgctcggactggccctgccgggcggcctgatcacgcccgaggtgaccgccatcatcagcaacggctcggcgatcctggcgagcctcaacggcatccggccaattctgcgctatcaatgagccaggatgtcacccagctcgtcctgcttcctcccggcgatcacgccgcactacaagccgcagtcaggacgctggagagctccaacctcgcggcaaggatcgccgactatgccggcatccccgtcaaccgggtcctgggcctgctgccgaaagccgccaaccgccagctcagcggactggtgcgcacggcggtgatgaaggggctggaagtcgccgtcgatacgctcgacgagaagccgccgcccgcacccgcggtcaccttttcatcgtttctcgccggcgtgaccggtggcgtgagcggcctgctcggcttcggtgcgctcgcggtcgagctgcctctgaccacgacgttgatgctgcgcgcgatcgccgagatcgcgcggcaccagggcgaggacctctcccggatcgaggccaggctcgcctgcctcgaagtgttcgcctacggcaccaagcgaaccgacgagaatctcgacatcggctactacgccgcccgcgcgctgatcagcaaatacaccagcgacgccgccgcctacatcctggagcgcggcgcggtggatgcctccgccccggtgatctccaacctggtcagcgaaatcgtctcccggttcgggctggtggtctcggacaaggcggcggccggcgcggtgccgatcatcggcgcagcgttcggcgcaaccgtcaacgtcatcttcatggaccatttccagaagatcgcgaaaggtcacttcaccgtgcgccggctggagcggctgcacggcagcgcgggcgttcgacaacactatgcggcgatcgcagccgggctcgggccgcggcgcggcgtcgcgacggtatgaggcgtttggcagcaattggacatcggcgccgtgcttccgcctgaggacaccaggctgcgcgaccttcgccgcatgcgcacgctggccacgggtttgctcgtgttcatgctgctggtatttctggcgacctcgatggcgcagccgcactggccgtggctggcctatccgcgcgctttcgccgaagccggcatgatcggcgcctgcgccgactggttcgccgtcgtcgcgctgttccgtcatccgctcggcatcccgatcccgcacaccgcgatcgttccgcagagcaagcaacgcatcgcggtcgcgctcggccgcttcatcgccaacaatttcctgtcgccccgcgtggtcggcgatcgcatccgagacgtcgacatcgccggctggacggcgcaatggatcgagcggccgacgcatgcccgcagcgcggcccaacgcacggtctcggcggtccatcaggccctgcaggcgacgccgagcgccgagatcaacgcctttctgacccgccgcactcggcagggcatcgcggcggttccggcggccccgctcgcttcgcgggtgctggcgctattatgggcgcatggcaacgcccaggcgctggtggagcgattgatcacatcggcgagcgtggcgctcgccaacaacaaggagacgatccgcaagaaggtctcgcagcgctcgtaccggttcgttccgaaatgggtcgacggcatggtggccgaccgcgtcatctccggcgtcagccagacgctcgacgagatgcgcgagccgaaccatccctggcgcgtcgagctcaaggccgagatcgagcgcctgatcgaccggctcgccaccgatcccgaatacctcgccaggggcgaggagctgaagcagcagatgctcgacaatcccgccgtgatcggacagatcgacgcgatgtggcacgccatcgagatgcggctgaattccgcagcgacctcggccgcgattgcggacgcgatcgaaaccgccctcacgtcggttgccgcccgggtccgggacgatgccgagatgcgcgaccgtatcaaccgctggcttcgcgtcgccgcgctgcgcgccgtcgcatcgcggcgccaggagatcgcggccttcatccgcaaggtggtcgaaaactgggacaccgaaacgctgatcatgcggatcgaaatgcaggtcgggcgcgatctgcaattcatccggatcaacggcaccgtcgtcggagggctcgtcgggctgctgatcttctcggtctcgcgctggctgtagcgcatgacgggattaagttgaacctggatcgacggcggaggttcacctctcccttgggagaggtcggcgcgtagcgccgggtgagggtctacggtccctcgtgggagctgcggcccctcacccgatttgcttcgcaaatcgacctctccccaaatggggagaggtgaaccgagcgcacggccaaagcgattcaataagatgcgctcgccgcgatgccgtcaggggaagcgaatgcgcagcagcggcagttgctgcagcctgtcgatcaggcgaaccatttggcttgccgccagaccgagacagccgagcatgaagtgacgtcgggtcagaccccgctcacggtctgcgaattcaagacgctcgaggcgtggcctgaggggagcgggggtacgcagggcgggaagcgtcgtcatatccatcagccgatcggaatgcggatttccggcgcggtggtcatctgctcgatcgtgccgtcgaacgacaggcaatccggattttcgccgggcatccggcggagcgtctcgaccagctgctcctgctcgagcaggaacgagcggccgtcgcacagccgggcataggccgcccagggcacgaatttggtgaacgggaacgggaatccctcgcgcggcgagacgtcgatgttcaggccggagacaaacaggacgttcttggtggcaaacgccggctcgcgcaggatgctccgataggtgcggtcgaactcggcctgggtgacgaagcgggcggcatccagcgcaggatgcggcgacgtcaccagggccggcatgaccggcgcgagcgccgcctcgagaaggtcatggccctcgggaccttcggccagcgcacggcggaagtgaaacagttcgggtgacagcgccgtcccgatcggcgccggcgtctcgccaaagcaggcttcgcccaaccgttcgcggatcgaatggcctgcgcgaaagaccttggacgtgctcagcacggtcaacggttgcggcggcgtctcgaccatgcggtcgagccgcagaaagacgccttcgctgcggctgtcgtcgagatattgattgtcgatctggaacaccggctcgccatcgagccggccgcactgcacctgccggcaggcatgcgcgtattcgtcctcgtaccagcgcagcacgccgcagagcttgccgcagcaatctccgaaccggcagccttcggtgcgatggcgctgatagacgccgaagcggccgtcatcgggattgtagccgacatggctggcctggatcagcaccaggtcctcgccgtgatgggcatagggcccgtggcggttgatcgcgaccttgccgccgacccgcccgtggtcgaacggaaacgtcccgaaatgctgggccagcagcatgaccggatagccctggctctcgtcggagcagaaggcgcgtgacggcagcatacgctgccgctcaaagccgagcgaccggcaatagttgtaaagccgcggcacgaaatggccgtagcgcatcgcataacggccaacccggaaggtttcgatcatccgctgcctgaccggtcagacgtaaccacccgcgagggagaattccccgctcccccgtaccggatcggaacggtagataccgttgttgacggttatgtgaatgcagccggagcgacgacccggacgcaacagccggtgcggctcagcgcccccagcgcagcacgaccggatcgagcgtgcgcgcgatctcaatcagtccggcgcgggtggccggatgcagcggttgcagcgggtgccggaccgcgtccgacttgatgacgccgccctcgcgcatcagcaccttgcaagcctgcaacccgcattgccggttctcgtaattgatcagcggcagccagcgcgcataggcctgcaccgcctcgtcgcggcggccggcgaggaacggatccatgatctggcggatgccgtcgggatagccgccgccggtcatcgcgccggtcgcgccggcatcgagatcggccatcagcgtgatcgcctcctcgccgtcccacggcccctcgatcacgctgccgcccttctcgatcaggccgcgcagcttgttggcagccatcggcacctcgatcttgaagtatctgacattggcgagctccttcgccatccgcgccaggaaatcgaccgagagcggcgtgcccgcgaccggcgcgtcctggatcatgatcgggatgccgatcgcatccgagaccacccgatagaactcatagatcgccggctcgccgacgcggaaggtcgcgccatgatagggcggcatgatcatcaccatcgcggcaccggcggtctccgcctcgcggctgcgcgcggcgcacaccgccgaggagaaatgcgtggtggtgacgatgacggggatgcggcccgcgacgtgctcgagcaccgtatgcatcacggtctcgcgctcggcatcggtgagcacgaactgctcggagaagttggcgaggatgcagatgccgtgcgagccggcatcgatcatgaaatcgatgcagcgccgctgtccgtcgaggtcgaggttgccgttgacatcgaagatggtcggcgccaccgggaagacgccgcgatagggacgctttgcgattgttggcataagacgacctcccaagtttgttgtcagctgttctcgtcaaacgccgcggtatggcagcggcggaccttcgagcctgcgcaggccgggctcgcgccgctccagccaccaaccatactgcctgggccaggacgcgaacacctcgccgcctccgccgcccagcgcaagctcggcgtgcagcggccagttcggatcgaacagcgcctcgcggccgatcgcgaccagatcggcctggccattggccagcacgtcttccgcctgctgcggatgcaggatcagtccgaccgcgatggtggcgatttcggcggcgcgccggatctcgtccgcatagggcacctggaagccatagccgcgcggaatccgcgccgccgtcgccgaaccgagcaggccgcccgacgaacaatcgatcagatcggcgccgcgcgccttggcttcgcgcgcgaacgcgatctggtcctcgagcgtcaggccgccctcgacgccatcgaccgaggagatccgcaccgccagcggccgctccgcgggccaggcggcgcgcacggtctcgatgacctcgagcggatagcgcatccgcccggcgcggtcgccgccataggcgtcgctgcggcggttcgacaagggcgaaaggaattcgtgcagcagataaccatgcgcgcaatgcacctcgacgaattcgaagccggcctccaccgcgcgcaaggtggcgcgccgccattgttcgcgcaacgcggcgagctcggccacatcgagcgcgcgcggcatcagccagccctcctccatcgggatcgcgctcggcgccactgtccgccacggcagatcgccgcgggcgcgatcggcctcgtcgagcgcggcattgccgtaccagggacgctgcatgctggccttgcggccggcatgcgcgagctggatcgcgggcacggcgccgttgtccttcaggaaggccgcgatgcgctcgagcggcgcgatctgctcgtcgttccagataccgacatcgccatgggtgatgcggccctcggccgcgaccgccgcggcctcgaccatcacgagcccggcgccgccctgggcaaacttgccaagatgaacaaggtgccagtcattggcgaggccgtcggtcgccgaatactggcacatcggtgaaatcaggatgcggtttcgggaggtcacgccgcgaagcgtgatcggctgaaacagaaacggctgcgacatcgggacctgcggacgcgtggtggcggggagaatggcggccgaaagctaggcagcgcgtcccgcaatcgcaagccgcacaacagcgcaggcggcaggacctgcacgcatgcagcacccgggcaatggcacgatccgcaaaacccgcagcatctgccgcggatattcgcgcggctggtaaacacattccactatccttggatgagtttcagtcatgcccggctgactttcagtcatgccgggatcgcgccacggatcgcaattcgcgccggacatgcctacattgccgacatgaagaaaatcggattcctttcgttcgggcactggacgccctcgccgcaatcccaggcccgctcggccgcggacgtgctcctgcaatccatcgaccttgcggtggccgccgaacagctcggcgctgacggcgcgtattttcgcgtccatcacttcgcccggcagctcgcctcgcccttcccgctgctggcggcggtcggcgccaagaccagccggatcgagatcggcaccgccgtgatcgatatgcgctacgaaaatccgatgtacatgatcgaggacgccggcgcggccgacctgatcgcgggcgggcgcctgcagctcggcattagccgcggctcgcccgaacaggtgatcgatggctggcgctatttcggctaccagccgggcgagggccagaccgacgccgacatgggccggcgccatgccgagatcttcctcgacctgttgcgcggtgaaggctttgcgcagccgaatccgcggccgatgtttcccaatccgcccggcctgctgcggctcgaaccgctctcgcaaggcctgcgcgaacgcatctggtggggcgccggctcgaacgcgaccgcggtctgggccgcgaagctccgcatgaacctgcagagctcgacgctgaagagcgacgagaccggagaggccttccacatccagcaggctgcacagatccgggcgtaccgtgctgcctggaaagaggccggccacacaagcgagccgcgggtctcggtgagccgcagcatcttcgcgctggtcgacgatcgcgaccgcgcctatttcggcaacgggcaggaggaagaccagatcggcttcatcgacgagcggacgcgcgcgatcttcggccgcggctacgccgccgagccggacaaactgatcgagcagctcaagacggatgaggcgatcgcagaggccgacacgttgctgctgaccgtccccaatcaactcggcgtcgcctacaacgcgcatgtgatcgagagcatcctgactcacgtcgcgccggcgatgggctggcgctgatcgccgccaaagaacgacgcaaccgcgggcacttgccggccgctcccgagttccggcggaactccgttctcaaagacggagaactacggaaacataactgcgcgttgtgagaagaacaggtcgggtacaatgcgttaggcgcgcacgttgcgtgaacagatcgccgcaatatcccgggaccgtcgtgcgtggcgcgtcttgcggaactgccgggtcaggaatccggatcgcgattgcggcgcggagatcggcaagcccgcgtgcatgaatggaaaggtcagcgttcaggcctgcccggacgcgttggccttggcgcgtaaaacggattgatcaggcaagttgccggattccctacggctgccgcctggcactgctccagcgacgtgaagatgcagtccattcgttcgccgatcagctcgccgtacacatgcatgcagacgggatagcgaggatcataggtttgtgccgatgccggcttcgtcatgcaaagcgcgctcagcgcgagcaacagcgctccaggcaacctcacgtaaaatctcccgctatggccgcgaaatatatcgcctcgccgacaaaaccgtctcgtgcaatttcgcctgagggctggagcgggcgaagggaatcgaaccctcgtatgcagcttgggaagctgccgttctaccattgaactacgcccgcgatctcaattgcttgaggtcgaccccatgggggcgactagccggaccatagcccgggccgaggtggcggatcaagcgcgcattgacgccgatcgccgcggcgccgcctgctactggcccatcctcacgagcacgtcattgatgacaaagggcgcagcgaccgatgcgtcgcagctccccccgcgggcatagatgcaggcatcgctgaagccgacgcgggcgcagctttgccgtgaaaaatccaccggcaggtcgcttgccgcctcgggccgcgcaaggatgcgattgaaggccggccgggtcgcctgcaacagcagcggcggcaggatcatctcggcaaggggatcggcgggctgcagcgcatagagcggcaccgggccgaccaagcgttcccgccccggcaactgctggaagcgaacgttgtaaagcgcaagtccgcacatctgcggatcgctgcgcagttcggcggcgagccgcgccgcgccgacgccgcgcgtccagtactcgcgcatcccttcgttggcaccggccagcgcgacggacagcagcgcccagccgccgaggacgatcggcaatgccaagcggcgccacgtggctttcgtgcgcagccattgcacccaatcggccgatcccagcgccgcgacgatggtgaacagcaccagcgacaggaacacgaagcggtattccttgtgcgcgatcaggctgtggaagacgaggttgaccagcgcgactgccagcagcaacggtgcgtggcgcgagccgcgccagatcgcggcgagcgggagcaggatcgccaccgaccaaacggtcaggaagtcgatcagataggccgagggcggcgacacgccgaattcgatggcgcgatcgtggacgaggttctccttgatgttcgcgatcagccaggcgaacggcacggcgccatgcgcaaggtcgatcgcggcggcaagcagcagcgcaacgagcccgccggcgaccatcggaacgaggtttcgccagcgtggccagcacgccccgaaagccagcacggcgatcgccggcgcatattggaagcggcagacgaaggcgaatgcgagcaaggcaccgccgatcgcaagccgccgctgtgacggatgatcggtgatcagcagcgccgccggcacgatcagcgccgtcgccaacggctcgcccaatgtgtgtggcgcgagcatgatcaattcgaaccaggtcgcggcggcaaacgctgcgacgacggcatgggttcgcgagacccgcgcaccgaggcaccaggcgctggccacgatcgccagcgacgcggatgcggcgatcagacgcggcagcaggaaggcgcctgcgccgccaggcgcgatcgcatcacccagcgcaaccggcccggccagcaatgtcggcaggaaccagccgcgaatgccctcgcgccattcccacgtcaaaacgccgtcgtggccgagcatccgccacgccggctcgagatactgaaacacttcgtcgggatagatcacgttgggccagaccgcggccgcaacgcggatcgccagcgccaggagcagcaatgcaaacaacggatgcaagcgcccgctcgcgcgcccgaccatgcctgctcggccgggcgcggcttcggcgctcgtgctggtcatcgttccgccgattgtcttctggagcagcatgccggcgaccagatagcgggcaaagcctttaagatgcgtgaccgggtgatgcgtgaccggacgttgccgaggtcacacagcggcggccgcaacatgcttaaccaaaccttaagattccggatgcgccggaccgcgacgatgttatgctctcgtgggggttggtggcgtcatggcggggcgtgggtacaccattttcgacacggcagtcggccgatgcggcatcgcatggggcgacgccggcgtggcgggtatccagcttccggagctccgcgagatcgaaacccgcaagcggctgttccagctctatcccgatgcacgcgagatgcggccgcccgaggagatcgagcttgccatcgagggcatcgtcgcgaccttgcgcggcggcgatggtgacctcacgggcgtggcgctcgacatgaccgacatcgcggccttcgaccagcgcgtctaccatgccgtccgcgacattccccgcggcgaaacccggacctatgacgaggtcgccagcgccctgcgcgcgaccggcgcggtctatgcggtggcgcaggcgctcggccgcaatcccttcatgatcatcgtgccctgccaccgcgtgctcgaggccggccactatccggaccggatttcggcgaacggcggcagcgtctcgaagcggcggctgctctcgatcgaaggcgcccagccgaccaccagcaagaccctgttcgacgtgctgctgcccgttgcgcggccccggccgcaagcctaaatctcgggaatgaaccgaaccacgctgctgcagcgcgaccgcatcacggtgaacgagtttcgctgcacggcggagcccggcgacaagccgttcgtcgagcaattcgcctgccactcggtgtcctatgtgcgcagcggcagcttcggctgccattgccgcggccgcttccatgaactggtggcaggcgcgatcctggtcggccatcccggcgacgaatacacctgcacgcacgaccatgtggtcggcgacgaatgcctgtcgttcttcctcgacccggagctggtcgagacgatcggtgaccgcgcggacgtctggcaggtcggctcggtgccgccgctgccggaattgatggtgatcggtgagctcgcccaaacggcggcagctggcaacagcgatgtcggcctcgacgaggtcggtcacctcctcgccagccgccttgtcgagctggtgtccgaccgcaaggcaaagccgctcaccgccggcctgcgcgatcgccgccgcgccgtcgaggcggcgctgtggatcgacgccaactcgcatcaccggatcgatctcgacgatgccgccgagcaggccggcttgagcagctttcatttcctgcggttgttctccgcggtgctcggcgtcacgccgcatcaatatctggtgcgctcgcggctgcgccatgcggcgcgacggctggtcgacgacgacagcccggtcaccgacatcgcctatgacgtcggcttcggcgatctctccaatttcgtgcgcagcttccaccgcgccgccggcgcctcgccgctgaagtttcgccaggcctcccgcggcgaccgcaagattttccaagaacgcctggcgctgcaatagctaggtttgctccggtccgcgcgtcaccgacgcgcccaacgactggagatctcaccatgtacgaccatatcggattgcgcgtcgccgacctcgacgccagcgtgcgcttctacaccgcggcgctggcgccgctcggcttcgtgctgtgctcgcgcgacgacagcggcgccggcttcggcccgaagggcgagcccgcgctctggctgcatctgcacaagggcaaggcacagggcggcgcccatatcgcgttccgcgcaccgagccacgaggcgatcaagacattccacagcgcgggcctgaaggccggcggcaaggacaacggcgcggcaggccaccgcaaggactacagcccgacctactatgcagccttcctgctcgaccccgacggcaacaatgtcgaggcggtgtcgacctgagatcagctcataaaaggacccaatccccatggcttcgattcaaaaggacattccaatcgacgcgccggcggaccacgtctgggacgcgctgcgcgatttcggcgcgctgcatacccggctggtgccgggcttcgtcaccgacacccggctcgacggtgacgttcgcaccgtgagcttcagcaacggcaccgtggcgcgcgagacgctggtcgattgcgacgacgagcggcagcggctggtctatgcgatcacgagcgaacggctgaagcagcattccgcctcggtgcaggtgcttgccgaggacgacgcgcactgccttgtggtgtggatcgccgacgtgctgccgcacgagatcgcgccctatatgtcggcgcagatggaccttggcgcggcggcgatgcaggcggcgctggcgaaatcggccaaagaaaagaacgcggcgtagcggcgctggcggccagaagatcttatcaccgtaacggtgtgagaattgtagcgagcggctctccctacatcgtcgtcctggcgaaagccaggacccatagccaccgaattcgattgagagtgcgatagtggccccagcgtcgctcgacaacaagcggtcggggtaatgggtcctggctttcgccaggacgacgccgacggtgtgagagccggggataacagcgcagagcgctacgacaacgccggctgcgcctcggcaacctgcgcggacttgccccagcgcgtcaggatcacgctgaggcaggagagcacgccgagcacgcccatcgaggcggcggcgagtgcgaagaagttctgcgcactcgcctcatgcgtcgacagccaccagccgccggtgccgatgaagatcagccgcgcggtctgcgccagcaccgggcccagcaccttggcggcgccctgcgaggagaaatacatcgacatcgcaaggccgatgaaggcgtacatgggcgccgcggtcgacagatattgatggctggtcgcccgcacatgcggatcgctggtgaataggttgacccagagatcggggaacacagcgatgaagctgccgaccacgccgaccgacaggaacgacaccgtgcccgcggtccaggcgatgcgccgggcgcgcgcgatgcgctcggcgccgaccgccatgccgatcatcggcaccgaggcgatgccgacggcaaacgcgaccgaggtcagcatgaattcgagccgcgcgccgatgccgtagccggcgagcaccgcggtgccgaattgcgccagcatgtgggtgaagatcgagatcgtcagcaccgattgcagcggcgagaagcaggagaccgcaccgaccctgaggatgtcgatgaacatcgcccattgcacgcgcaaccccctgagcttcggcttgacccgggcgcggcccgagaacaggtaccagcccatcacgctgatgctgatcgaataggcgatcagcgagcccgcggcgacgccgcgcatgccgaattgcggcaccgggccgaggccgagcccgagcgtgccgccgagcatgatctgccacaccgccgaggacaggatcatggtcgacggcagcttcatgttgccggtgccgcgcaggatgccggccatcgtgttcatcagccagggcaggatcgcgccgccgaagaagatctgcgtataggcgatcgcctgcgccagcacattgccgcggccgccgagcagttcgagcagatgcgggccgaagatcagcatgcccagcatgaaggtgacgccgaaggtgaggccgatcagcagcgcatgcatcgccagcgtcgacgcgcgctcgatctcgccggcgccgagtgcgcgcgcgatcgcggatgcgacgccgccgcccatcgcgccgcccgacatcgtcatggtcaggatcacgcagggaaacaccaatgccatcgccgccagcgactcgacgccgagccggccgatataggaggtctccgcgatcaccacgcaggtgcccgcggagagcgcgatcacattcggccaggccagccacaacagcgtgcgcaggatcgggccgtcgagcagcgcgttgcgcgcgggcttggtcaccggcggcggcagcggccgctcctggtcgtcgacaggtatttcggcgaggccgaggtcggacatttccactcccacgcgcgcagtctgggagccgcgccatggtgtttccctaccatggtggcggcgaaatccacgtgcgcgggacgcaaggggggcctgcgcgattgcaggtgaaccttgatgaacctctgatctagccgatcgaccacacgaacggcgcgccggcggtgctgttcggcttcaaatgcagcggaatgtgccgtccacagccggccgccagcccctcgaacagcccggtcagcacgctggcgcaggccgggtgataatcggccacatcggccatcagcttccagccctgctggcggatctcgaactggccttcggattcggtgatctcggcaacatcatcctgcgactcgaacagcgtgcgcaggaatgcggcaaattccgtggcacggccacggctgccgccgagcgcctgcgcgacctcgtcgaaatactgcatgccgatcagcttgccggtgagatgcagcagatagctcgcatcctccgggccgaacacctgcacgatgacgggcgcggccgtcttcacatattccatcgcgtagttgcgataggccttctccagccgcggctttggccagctgtcgaccggcagcgccggcgcagtgttcggatcaaacggcggcgcctcgagatggcgcgcgaacaccaggcgctggtcgagctcaagcggatggtcatattcgcagtaatagccctcgaggccgtcctggccgtcgacgctctgcttggtgcagacgaagccgagcctgagatcgccgagcgcgacaccgttgttggcgtgccagccgcgcagcatcgcgcgcgagacctcgcccggcacaccgcagatcgcggtgcccttccagatccagcgcggcggcggatagcggatccaggccttgcggtcgttctcgtacacgtattggacatgcacgccgccgatccagttggagagataatgatactgcgcggccgcgaccgccggcggcaggccgtcgaggccgagcttcttcagaccgggcaggaagcgctcctgctgctggcggcgaaacacgcggaagacgaactcggcggcatcggcggtgccgcgccgcgtcaccacggtgaggatcagcccggtgaagaaggcgtgatagagatcggcgacgctgcgccacttccgccactgcgcttcttgtgcggactccgttgcggcgctcatgttcactcccgatctgttgtttgccggaatgtgtcaccgccagcgaggcgacgcaaccacacacccggcgtcatcgccccactcgatcgggcgatgaaatgatccggagcccgcgatctcgattcatgcttcgtctcgcggctgaatctttcacctcgccattgagcacgaagccgaaaatgggggccgaacagaccccttcacaacccgagatcgctcaatgacgggtgatcgtcggggcgccggccaagaggccaatggaatagacgatcctcgggcttgatcggtaggtcgttgatgcacgcatgacggcggcacatcaggccattcggctcgaactcccaattctcgttgccatacgacctgaaccagtttccactgtcatcgtgccattcataagcgaaccgcaccgcaatccggtcacccgtgtaggcccacaactcttttatcaggcgatagtcgagttcgcgggcccactttcgagtcaggaacgcctgaatttgatcgcgaccctcgacgaactcggaacggtttcgccagcggctatctggcgtatacgccagcgatacccgggcaggatcgcggctattccacccgtcctcggcaagtcggaccttcagcgcagcgccttcagtggtcgtaaagggcggcacgggcggacgttcggcttccattgccaatctcctgttgtggcgagctctgtttcgtaagctggagaggacccgagccgacggcgaagtcgtcggctcgggagacaccggtcaggcggccttgagatcgttcgcttgcacgacagggaaatcgatatcggtcttggcgacctcgttgacgaaattagtgaagacgttctccacaacgagggcgacaatttcgagcacttgagcatcgctgtacccggccttgcgaaccgcagcgatatcttcgtcgccgacgtggccgcgcgtttcggcgaccttcgccgcgaagcggacggcggcatccgccttcggatcgccggaagttcccttccggttgagggcgatctcttcagcgctgatcttggccagattcagtccgaggtaagtgtgagccgacagacaatagtcgcagccgttcacctgggccacggcgagcgcgatgcgctcgcgagtcttgacatccagactcttcgcaagagttccgctgaggccggctaaggccgtgagcgccaccgggctgctggagaccacccgaaacaggttgggtacgacgccgagctgcgcgttgacggcagcgaggatcggcttggaggctgctggcgcatcgtccagcgcgggaatgggaaggcgggccatgatgatctccatcgttggttgaacggtaacaggccggttgggtcggctgaccacggacataggtccttccagtaggaatgataatgctgtaatttcgagaggcattgtcttggtgagtgagataatcaattggatcgtttggaggcgatgacggtcctcgtggccgtggtggacaacggaggcttcaccgcggcggcgcgtgcgttgggtctgcctcttcccaccgtcagtcgaaagctggcagagctggaatcgcatcttggcactcggctgctgaacaggtcgacgcgacggatcgcgctgaccgacgcggggcaggactacctgtctgcttgcaagcgcatcctcgaggagatcggggacgccgagcgaaaggttgccggcgaatacgtcgctccgaagggggagttggtcatatccgcgcccatcgtgtttggcaggctccatgtgatccctgtcatcagcgagtttctggcgaaacatcctgatatcgacatccggatcgtcctgtccgaccggaacgctcatctgctcgacgacgacatcgatctggccgtgcggatcggccgactgcgcgacagctccatggttgcaacgcaagtggggatggtgcgccagatcacttgcggaagtccaaactactttgcggcgaacggaattccgaaagtgccgcgcgaccttcaaaaactttctgtcattaccttcgaggcgctgaattcagggacgtcgtggtcctatggaggcaagaagagcgaagcgctgccagtccgctcgcgcctgtccgtcaataccgcagaagccgcgatcgatgcggcgattgcgggcacgggcgtgacccgagtgctgtgctatcaggccgcgcaagcggtcgctggcggcaagttacaggtcgtgctcagctcctttgagcctgcgccggtgccggtgagcatcatctacgcaagtcaaaatatgcttccgctgaagatgcgcagcttcatcgattttgcggctccgcggcttcgcgcaaggctttctcaactcgctgatcgcgccaaggcgtaagccggacaggccgctgccttggctggccccagagcgatctctcggcgtttgccctgcggaatatcgctacacgcgaaaatgcttggagagcttcaggccctgcgcctgatagttcgagccgatgcgctggccgtagagcgcatcgggacgctccagcatgcgttcatagacgaggcggccgacgatctggccgtgctcgagaatgaacggcacctcgcgcgagcgcacttcgagcacggcgcgcgcgcccttgccgccggcgccggcatagccgaagccgggatcgaagaagccggcatagtggacgcggaattcgccgaccaagggatcgaacggcaccatctccgcggcgtagtccggcggcacctgcacggcttccttggacgcaaggatgtagaattcgccgggatcgaggatcaggctgccgtcagggcgcgccttgatcggctcccagaactcctcgacggcatagccgccgcggcgatcgacatcgaccacgccggtgtggcgcttggcgcgatagccaacgaagccgcccgagttttcgccggagagatcgaccgagagcgcgacaccatgggtgagatcggcattgtcggcatcgaccagccgctcggcggcatgcagctcgtccagctcgtcggcggtcaaggtcgcctcgccgatccggaagcggacctggctgagccgcgagccctcccgcagcagcaccggaaacgtcttcggtgagatctcggcatagagcgggccgtgataaccggcaccgatcatgtcgaagcggcgcgtgccgtcggcgatcacgcgggtgaagacgtcgagccgtccggtcgagctcttcgggttggccgcggccacgatctccggcggcagcgccaggctctccagcagcggcacgatgtagacgcaattggtctccagcacggcgccgtcggagagatcgatctcgtgcagcttgagctggtcgatccgctcggcgacggtggcatcgggccccggcaggaagctggcgcggacccggtaggcgatgtcgccgaggcggagatcaaggcttgccggctggatctggctctcgacaaagtcgtaggcgggcagaatgaggccagcctccgccatctccgcgatcatgcggtcgggcaggattccgttggattcatcttccagcgtgaacgacacggcgcggtccctcggcgatccctcgagatggcccaaaatcaacctctgacgggccaccaagcccccatatatgggcttttacgggttatccgatgaccgtcttgacggaaagggcgcgagggaatatcagctgcacttatcccgtggtgatttgagccggccggcttgcagccacgttaaataagtcgctaaacaggccggggacagtgtgatcccggtctgtggaggttgctccaggccggtttttttgtggccattttcgccaggaaatggccacctcggaggtcacatgtctgaatctgaaggtaccgcccgcttccgtcccgaaacccgcctggtccatggcggcacgctgcgctcgcaattcggggagacgtcggaagggctgtttctcacccagggttacgtctacgacaccgctgagcaatgcgaggcgcgcttcaagggccaggatcccggcttcatctattcgcgctattccaacccgacgattgcgatgttcgagcgccgcatgatcgagctcgagggcgcggaagccgcgcgctcgaccgcgaccggcatggccgcggtgaccaccgcgatcctcgcgcccctgaaggccggcgaccacgtggtggcatcgaaggcgctgttcggctcctgcctctacgtggtgcaggacctgctgccgcgctacggcatcgagacgacgctggtcgacgggcttgacctcgaccaatggcagcgcgcgttgcggccgaacaccaagaccttcttcctggagagcccgaccaacccgacgctcgacgtgctcgatatcggcgcgatcgccaagatcgcccacagcggcggcgcccggctgatcgtcgacaacgtgttcgcgacgccgatctggcagagcccgctgtcgctcggcgccgacgtcgtggtctattccgcgaccaagcatatcgacggccagggccgctgcctcggcggcatcatcctgtcgtcggaagccttcatcgccgagcacatccacaatttcatgcgccagaccggcccgtcgctatcgccgttcaacgcctgggtgctgctgaagggactggagacgctcggcgtccgcgtccgcgcgcagaccgagaacgcggcgaagatcgccgaggcgctggcgagccatccgaaggtcacccggctggtctatcccggccgcgcggatcatccgcaggccgcgacggtgaagaagcagatgggcgccggctcgacgctggtcggcttcgaggtcaaggacggcaaggccggcgcgttccgctgtctcaacgcgctgaagatctcgcgcatctccaacaatctcggcgacgccaagagcctggtcacgcatcccgccaccacgacgcatcagcgcctggcgccggaagcgcgcgccgaactcggcattagcgagggttttattcgcttctcggccgggctcgagcatcccgacgatctgatcgaggatttccagcgcgcgctggagcaggtctaaacttggatcggaagcggaggctcacctctccctcgggagaggtcggcgcgtagcgccgggtgagggcttacggtccctcgtgagagttgcggcccctcacccgatttgcttcgcaaatcgacctctccccaatggggagaggtgaagcgagcgtgcggctaaagcgattcaatcatcatgcgttacgtcgccgccgtcgtaacaccgccgtcgaccacgatggtctggccggtcatgaaggtcgaggcgtcggaggcgagataggccaccgcgcccgcgatctcgtcgggctcgccaatgcggcggagcggcgtcgacgcggtgcgacgcttcagattgtccggatcctcccacagcgcgcgggcgaaatcggtcttcaccaggcccggcgcgacgcaattgacgcgcacgcccttcgggccccattcgccggcgaggctgcggcacagcgcgaagtcggccgccttggagatgccgtaggcgccgatcacggtcgagccgcgcaagccgccgatcgacgagatgatgatgaccgagcccttgccgcgttcggccatctgcgggatcgccagcgcggagagccagatgttgctcttgacgttggagcccatgatcttgtcgaaggcctcatcggtgatgtcgagcagcgggccgtaatacggattcaccgcggcgttgcagaccaggatgtcgatcttgccgtaatgcttgatggtgccggagaccagcgcctcgacctccgcgcggcgcgcgatgttgcaggggatcacgagggcatcaccgccggccttcttgatgccgtcggcgacgacctcgcaggcatccgccttgcgcgaggagatcacgaccttggcaccgagttttgcgagcagctccgccgaggcgcggccgatgccgcggctcgagccggtgacgaccgcgacctgaccggtgagatcgaacggggtgttcttcattgttgttgcctcccggatcggccgtcattccggggctcgcgaagcgagaacccggaatccattgggccgcatgatttgtcgtggaatggattccgggttcgccgcgttgcggcgccccggaatgacgtttgtgcgatcaggccaacagcccgccgccctcactgacgcgacggaggtggtagtcggtgtcgccgagcgtgttctcgatcatggtcagccgcttgaagtagtggccgatcttggcttccatggtcatgccgatgccgccgtgcagctggatcgactgctggccgacgaacttcagcgacttgccgacctgcaccttggcggccgcgaccgccgacgaacgctccttggcatcgctgaagtccgacgccatggtcgcgaacatcgacatgctgcgggcctgctccagcgccacgaacatgtcggcggcgcggtgctgcaggctctggaacgagccgatcgcgacgccgaactgcttgcgggtcttgatgtactcgacggtgtccttcagcgactggtccatcgcgccgaccgcctccgcgcacagcgcaatgcgggcctcatcggcgacacgctcgatcagcggcaggccgttctcgggatcgccgatcgcagcatccgcaccgacttcgacattggtgaaggtgatgtcggccgcgtgcaggccgtcctgggtcggatagccttttttggtgatgcccttggcatccgccgggaccaggaacacgccgatgccggccttgtcgcgctggccgcccttggtgcgcgcagtgacgatcagcgtgtcggcgttctcgccgttgagcacgacgaacttctcgccgtcgatcacccagccgtcgcccttcttcttcgccgtggtcacgacgtcgaacaggtcgtagcgcgagttcttctcgagctgggcaaagccgaaggtcttgctgccgtcgatgatgcccgggatgtacttggccttctgctcggccgagccgccatggcgcaggaagccgccggcgacgacgacggtcgcgagatagggctcgaccaccagcgccttgccgagcgcttccatcacgatcatggtctcgaccgcaccggcgccgaagccgccgtcggtctcggcgaagggcagacccagcaggccctgctcggcgagcttgccccagagcgctttgctccagccgcccttctccttcatgtacttcttgcgcgcatcgaagtcgtaggcatccgccagcaacccgtcgacgctttccttgagaagccgctgctcctcggacagatcaaaatccatgttcgttcccttaactaactgatcgttgttcaagccggggtctcttcacctcgccccgcttgcggggagaggtcggatcgcatcgtcagatgcgatccgggtgagggggtacaggtctctcggcattccctgcacggagagaggcccctcaccccaaccctctccccgcaagagcggggcgagggagaagagaaatcaaagccccagcaccgccttgctgatgatgttgcgctggatctcgttggagccgccgtagatcgaaaccttgcggttgttgaagtagctcggcgcgatctgcgcggtccaatccatgctctcgttcgaaccggcatcgccgtgctcgtcatagggcgcggcgaacgggccgatgatctccatcagcaactcggtggtggtctgctggatttcggagcccttgatcttgagcaccgaggatgccggattgggcttgcccttgccgtgcttgccctcgtcggcgacgacgcggagctgggtcagctcgagcgccttcagctcgatctcgcaggcggtgagcttctcgcggaacgccggatcctcgatcacaggacggccgccggactcgaccttggaggccagcgcgcggatgcgacgcagccgctccttcgagacgccgacccgggcgatgccggtgcgctcattgccgagcaggaatttggcgtaatcccagcccttgttctcctcgccgatcaggttctcgtagggaacctcgacgtcgtcgaagaacacctcgttgacctcgtggccgccgtcgatggtctggatcggacgcacggtgacgcccttcgacttcatgctgaacacgatgaaggagatgcccatctgcttcttcgcgttcttgtcggtgcggcagagacagaagatcatgtcggcgtgctgggcgagcgtggtccaggtcttctggccgttgatgatccacttgtcgccacggcgctcggccgtggtcttcagtgaagcgaggtccgaacccgagcccggctccgagaagccctggcaccaccagtcgtcgacattggcgatgcgcggcaaatattccttcttctgcttctcattgccgaaggtgtagatgacagggccgaccatgctgacgccgaaggcgagcggctgcggcgcgggataggactgcagttcctcgttgaagatgtagtgctgcacggtggtccagccggtgccgccaaattccttcggccagtgggtgacgccccagcccttcttgttgaggatgcgccaccaggtgaccatctcgtccttcgacagatgacggccttcctgcagcttgcgccttgtctccggcggcacgttgttcttgaagaactcccgtacctcctcgcgaaacgctatctcttccttggtgaaagcgagatccatcggatcctccttattgaacgactgatttggcttgcgatgtcttgggctgttgctggcgcaattcgtgacgcgacagttttccaaccggggtgcgcggcagttcggcgacgaattcgaccgccgccggcaattcgtgcttgcccaacttgccggtgaggaaggcgcgcaactcgtcgatcgtgaacgctttctcgccgtcgcgcagcttgatgaaggctttggccgcttcgccgcggtaatcgtcgggaatgccgatcacgatcacctcctgcacggcaggatgggtgtagatcgcctgctcgatcatctgcggatagacgttgaagccgccggagatgatcatgtccttcttgcggtcgaccagatagaaatagccgtcggcgtccatgtagccgatgtcgccggtgaggaagcggtcgccgacgaaagcctccgcggtctccgctggcctgttccagtagcccttggtgacgttcgggccgcggatgcggatttcgccgacctcgccgaccggcatcaccttcgtggaatcctccagcgacaccacgtccatctcgatgccgggcagcatcagcccgatcgagcccggcttctccggtccttccttgggatggccggtgccgggcgagcaggtctcggtcatgccccagccgctcttcagcttcatgccgacgcggcgctcgaatatcttggcgacctcgaccggcagcggcgcgccgccggagcccgcgaccaccagcgaggagagatcgcgcttgtcgagatcaggcagcgaggcgatcgcgatccacatcgtcggcacgccgggaaacaccgtcgcgcgcttgacctcgatgtcccgcatcacggcctcgacgtcgaagcgctgatgcagcgagatcagatggccgcgccggatcactgacagcagcacgacggtcagcgcatagatgtgaaacagcggcagcacgcagatcacgcgctcaatcgcattgcgttcgagccgcccgggcctgccccagacgtcgtagatcgacaccgccgcggtgagattgccgtggctgagcatggcgcccttcggcaggccggtggtgccgccggtatattgcagcagcgcgacgtcctcgacatcgaccgcgggccattgcgacggcttggtcacgccctcgatgaactggcggtgcgtgatgatcttgggattgtcgggcagcgcggtctgctgtgtgccgaccttgccccaattgtcgtcctcgcagacgatcagacgatcgagcaggcctttgtcgagaaacttcagcgcggtcggcaacagcgccgagagattgctggtaaccagcacgcgcgcaccggaatcggagagcttgtgcgacagcgcgatctcgccgtcgagcggcgacagatgcacgattcgggcgccggccttcagcgcgccgaagaaattgatcggatgatcgggcgaattgccgaggaacagcgcgaccgaggtgcccttgccgtagccggcccgcaagaaggcggcggcggcggtctcgaccagggactcaagttcgctatagctgatctgccggtcgcggaattcgagcaccgggcgcacaccgaactcggcggcagcgttggagagcaggtcgggcagcgtgccgcgcgtgatctcgtcgctccacttcacgccagaaggataatattgttcgccgggataggtcatgaaaggtcttgcatctgtgaggtgaccccgctgcgcgggctcccctcccccttgcggggaggggttgggggaaggggtaccacacgggcagtcccgacgcggctacccctctccctaaccctcccccgcaaggggggagggaaccctaccagcgagtccttggccagaaagcggatcacgccgccttcgacgcggcggcgagcgaggcgaaggtcttgccttcgtccgcaagcttcctgagcagcggcgccggctcgagcgagggatcgttggtctccttggcatagaacgccaggcgatcggcgatgtgcttgaggccgacgctgtcggcccaaaacatcgggccgccgcgatagatcggccagccatagccatagagccagaccacgtcgatgtcggacggacgcgccgcgatgccttcggcgaggatcttcgcgccctcgttgatcatcgggtacatcatccgttcgaggatctcgtcgtcggtgacgacgcgcttcttgcggccgaggcgcgccagcgtctcgtcgatcagcttctcgacctccggatcgggcagcgccgcgcgcgagcccggctcgtacttgtagtagcccttgccggtcttctggccgaaccggccggcctcgcacagcgcgtcggcaatctccgacttgatgccgcgatccttgcgcgagcgccagccgatatcgaggccggcgagatcgcccatcgcgaacgggcccatcggcatgccgaacttggtgacgacggcgtcgacctgctgcggcagcgcgccttcgaacaacagcttctcggactgcttgccgcgctgcgccagcatgcggttgccgacgaagccgtcgcagacgccgaccacggccggcaccttggcgatcttgcgggcgatcgacaccgcggtcaccagcgcgtccggcgcggtcttgtcggcgcggacgatctcgcacagcttcatgacgttggccggcgagaagaagtgcatgccgagcacgtcctgcggccgcttggtcgactgcgcgatctcgtcgatgttgagataggaggtgttggaggccagcaccgcgcccggcttggcgtactgatcgagcttgccgaacacttccttcttgaccgccatggtctcgaacacggcctcgatcacgaggtcggcgtcgccgacgttctcgatgccgacgacaccgttgatcagcgccatgcgcttggcgggcgcatccgccgggatgccgccacgcgcggcggtcgcctcgtagttcttctgcatgatgcccatgccgcgcttgagctgctcctcgccggtctcgatcagggtgaccgggatgccggcattggcgaacgacatcgcgatgccgccacccatggtgccggcgccgaggatggcgacgcgcgccacgttgcggcccttggtgccttcggggacaccggagatcttggcggcttcgcgctcggcgaagaacgcgtagcgctgcgccttggactgctcgccgttcatcagcttgaggaagccctcgcgctccttcttcagaccttcctcgaacggcaggtcgatcgcggcgcccacggcgtcggcagcggcgaacggcgcctcgaggccgcgcgacttcttggtcaacgcagcgaccgcattggtgaagatcgagcggtcggccttggccgcggcaagcttggagtcgtcatcgcgcagcttgcgcagcggacgcttctcggcgaccaccttgcgcgcaaatgcctcaccacccgaggccggaccttccacgatctcctcgatcaggccggccttgagcgccgcatcggcgctgatcggatcgccgccgacgatcatcttgaccgcaagctccgggccgaccgcgcgcggcaggcgctgggtgccgccggcgcccggcagcaggccgagcttcacctcgggcaggccgagcttggcgtccttggtggcgacgcgatagtggcaggccagcgcgacctcgaggccgccgccgagcgcggtgccgtggatcgcggcaacgatcggcttcggcgagctttccatcaggctcagcacttcggcgaggccgggcggcttcggcggcttgccgaattcggtgatgtcggcgccggcgatgaaggtacggccgccgcaggtcagcacgatgccctggacctgcgcgtcatcgatcgcagccttgacgcaatcgaagatgccaccgcgcaccgcggcgctgagcgcattcaccggcggactgttaaccgtgacgacggcaatattgtcatgacgttcgagcttgacgacttcactcaccgggactctccctggatgcttgttcttgaacttgcgttgagtagctgaacgacttgcgtcgagccgctgcgattagaccaatttcgcactgcgaaatttaattccacatcttgacacggagggttattttgaagcacgagccttgtcaacgagcatgacaagggcaggacaaggatcggcatgaagcgcgccagcaagaaagcagcgaccgatcgcaatttcgtcgtcgcgctttcccgcggactggacgtcctgcgcgcatttcaacccaatgacggcctgctcggcaatcaggagattgctgcccgcaccaagttaccgaagccaaccatctcccggctgacctacacgctgaccaagctgggataccttacacctgtaccgaaattcgagaagtatcagctcgcgccgtcggcgatggcgctcggctacgccgcgctcgccaatctcggcgttcggcatttgtccgaaccctatcgagaagaagtgatgcgcgcgaccggcggcgccgtcgccgtcggcggccgcgaccgtcacagcatgatctatttcggccagagccgaaacggcctggcgctcggcgtgcaactcgacgtcggctcgcgggtgccgatcgcaaccaccgcgatgggacgtgcctatatttgggcattgccacccgacgatcgtgcggcattattgcgcgagctgcgggatcactatggcagccgctgggccaagatgcgtgacggcatcgagcgttccggcgagacggtggcgaagcacggcttcaccatgtcgaccggcgactggcagaacgacgtcgccgcggtcggcgttgcattgagattgaacgacggaaccggtccttacgccttcaattgcggcgcgccggcattccgcttcacggaagacagattgctcaacgacattggacctcgtcttgtcgcgatggtaaggaacatcgagcaggcgctcggtggaatggcgccgcaatccaaaaaagaagaacgcaaaaagaccagagtaggagggaaagttgcacgtttggccgaggggatcagatagcctccatcacgtccagcgaaacgcatcgcaggaccgctcgcaccgctcgaagacggcgggcgagacgagatgacgcaggcacagctcgcgcaggggaatgatcccttgctcgcggttcgcgacgtcagcgtcgtgttcggcggcatcatcgcactgaatggcgtgtcgttcgacatgcgccatgggcagatcctcggactgatcgggccgaacggcgccggcaagacgacgctgttcaattgcctgtcgcggctctatcagccgtcgtccggcgacatcctgatggaaggcaagagcatcctgtcgcggccgccgcaccggatcgccgagatcggcatcggccgcaccttccagaacgtcgcgctgtttcccaacctatccgtgatcgacaatgtgcgcgtcggcgcgcatgcgcgcacctcgagcgacatcgtcagcgactcgctgcgccttgcctgggtccgccgcggcgagaacgacatgaacaagaaggtgcacgacatcctgggctatctcgatctcgagagcgtcgcccacaccgtggtctcgggactgccgttcggcacccagaagcgcgtcgaactggcgcgcgctttggccgcagaccccaagatcctgctgctcgacgagccggccggcggcctcaatcacgaggaagtctacgtgctcggcgatctgatccgcaaaatccgcgatgaccgtaaaattacggtgttgctggtcgagcatcacatgggtctcgtgatgtcgatcgccgaccacgtcgtcgcgctcaatttcggccgcaagctggccgaaggcacgccggcccaggtccaggccgaccccgacgtcatcaaggcctatctggggagcaaggaccaatgaccacgatgctcaacgtcaaggacctgcgcgcctattacggccaggtccaggccctgcacggcctcagcttctcgctcaacgagggttcgctgaccacgctgctcggcgccaacggcgccggcaagaccaccacgctgcgggcgatctgcaacatggtgcgctcgaccggcgcgatcgaattcgagggcaagccgatcggcactcgttccactgaaaacgtggtccgcctcggcatcgcccatgtgccgcagggccgcggcaccttcaccaacatgacggtggaggagaatttgcagttaggggccatcagccgctccgacaccaaggcgatcggctccgacatcgagcggatgtacgagcacttcccggtgctgaagcagcgctacacccagcaggccggcacgctgtccggcggcgagcagcagatgctcgcggtggcgcgcgcgctgatgctgcggccgcgcctgatgctgctcgacgagccgtcgttcggcctcgcaccgctgatcgtgcgcgacctgttccgcatcctcggcaagatcaatcgagaagagaaggtgaccatcctggtggtcgagcagaacgcgcagctcgcgctcgagctcgccgaccaggcctatgtgatcgaaaccggacggatcgtgatgtcgggcaatgccaaggacatcgcgaacaacgaagacgtccgcaaatcctatctcggctactgagggagctggctcaatggagctttttgccaaccaggtcctggccggcatcgccaccggcgcgatctatgcatgcatggcgcttgcggtcgtgatgatctaccaggccatcgaccatctgaatttcgcccagggcgaaatggcgatgttctcgaccttcgtgtcctggcagctgatgcaatggggcgtgccctactggggcgccttcgtactcacggtcgccttttcattcgccgccggcatcgtcatcgagcggctgctgttcaagccgctggcgaaggcgccgatcctgaccaacgtcgccgggttcatcgcgctgtatgcgatcatcaactcggtcgccggcctgatctgggacttcaccatcaagcaatatccgacgccgttcggctcctcgccgttcctcggcagccagctgatctcgacccaccaggccggcatgatcggcatcacgctgttgatgctgctcctgctgttcttcttcttccgcttcacccgggtcggccttgcaatgcgcgccgccgcctcgctgcctgaatcggcccgcctcgtcggcatcaacacctcgtggatgatcgcgctcggctggggcatggcgtccgcgatcggctcgatcgccggcatgatgatcgccccggtggtgttcctcgagccgaacatgatgctcggcgtgctgatctacggctttgccgcagccgtgctcggcggcctgacctcgccattcggcgccgtgatgggcggcttcctggtcggcatcttcgagaacctggtcggcacctatatccccggtgtcggcaatgagctgaaacttccgatcgcgcttgcgctgatcatcgtcgtcctggtcgtgaaaccggcaggcctgttcggccgcgccatcgtcaagcgagtttgatcatgagcgccgctgaagaaatcgtcacagaagcccccgccgtcgaggccgtgcccaagcgtgccatgacgctcggctatggcacctcgctcgccgtgctcgccgcgctgatcatcattccgctgttcgtgaagaacttcatcatcttccagatgacgatgcttctgatctacgcgctggcggtgatggcgctcaacatcctgaccggcggcagcggccagttctcgctcggccagagcgcgttctacgccgttggcgcctatacctcggcgatcctgatggagcatgcgggcatgaactatgccctcacgctgccgatcgccggcatcgtctgcttcggcttcggcttcctgttcggccagccggcgctacggctttccggcgtctacctggcgcttgcgaccttcgcgctcgcgaccgcgatgccgcagctgctcaagctcggctatttcgagcactggaccggcggcgtgcagggcctcgtggtgaccaagccggacgcgccgttcggcctgccgatgtcgcaggacatgtggctctactacttcactctggtggtctcgatcgcgatctatgtcgcctcggtgaacctgctgcgctcgcgctcgggccgcgccttcatggcgatccgcgacaacgagatcgcggcctccgcaatgggcgtcgacgtcgcgctgtacaagacgctggcattcggcgtctcggccggcatcaccggcgtcgccggcggtctcggcgccatcgcggtgcagttcgtggcgccggacggctacaccatccagctcgcgatctcgctgttcctcggcatggtggtcggcggcgtcggctggctgcccggctcgatcgtcggctccgccttcatcatcttcgtgcccaacatcgccgaaggcatttccaagggcctctccggcgcggtgttcggcgtgctgctgttcctcgtcatcttcctcgtgccgcacggcgccaggcaggttgcgatcgttgcccagcaactggccgcaaagctcaagaagaactaagaatctttagaaccaaaccaggagacattatgctttctaccgttcggatcgccgcgatttccgcggcgatcacggctgtcgccgtgacgtccaccgccgcattcgcccagaagaaatacgacaccggcgcaagcgataccgagatcaagatcggcaacatcatcccctattcgggaccggcctccgcctacggcgtgatcggcaagaccgaagaagcctatttcaagatgatcaacgaccgcggcggcatcaacggcagcc

SEQ ID NO: 15 - DNA, 164900 bp, Bradyrhizobium enterica
gccggccgcgcccggcgtgcgcggcttccgcgacatcaccgcagacgccgacgatctcggtcgtgccgcggcgcaggccagccgcaacgcgcgcaagacctacgccaacgtgccgtcgccctcgccggaattcgaccggctcgagccgagcctggagaaccgcggcggcgatcccgaggcgccgtactcctacgacgagtcgatcgaggaggcggagcgctacaccccgcagcaaccgccacaggcgccgccgccacggtcgcgggtcagcaatgccgagcgcgagccgaagcggccgcgcgtcggttcgattttcccgttcaagaccgcgatcgtgatcggcatcctgctgatcctggtcggcgccggcattctctggggcaagccggccctgacctatgtcagcaccctgttcaattcctctgcgccggtcgaggcgccgaaggacgccgcggcgacgccgtcgagcaagaagatcaccgatcgggtcggccagccgtcgtcgtcgggcgagccggtcgctccggtggcgcagcgcgtcgtgctctatgacgaggacccgtcggatccgaagggcaagcaatatgtcggttcggtggtctggcgcaccgagcaggtcaagggatcgggcaaccagaagcccgacatcgccgtgcgcgccgacatcgacatccccgatcgcaagttcaagatgacgatgtcgttccgccgcaacaccgattcatcgctgccggcgagccacaccgcggaattgaccttcatcctgccgcaggacttcgccaatggcggcgtcggcaacgtgccgggcatcctgatgaagtccaacgagcaggcgcgcggcacgccgctggccggcctcgcggtcaaggtcaccgacggcttcttcctggtcggcctctccaacgtcgatgccgaccgctcgcgcaacctgcagctcctcaaggagcgctcctggttcgacgtgccgctggtctacaccaaccagcgccgcgccatcatcgcgatcgagaagggtgcccccggcgagcgtgcattcaacgacgcgttcgcggcgtggggtgagtagcggcctccgcactcacctcggtgggtgagatgtcatcgcccggctgtgtccgggcgattccgtatcgcagcaacctctggctgttgcaccgcattcaccgcgcagcgcccggaacattccgggcgctttcgattttctctagaaccatcgtgcgactgcgttacacttggccgacgtcgggcaagggcacgccatgaaacgctatctgatcttcgcagccatcgggccgttcatcggcggcttcctgctgctgctgatgaccacctatcagtccggctactggaccgagaccaatggcggcgaagtggcgaagctgctcgtcgtgttcgtgaagtcgctgcaatacaattatctgttcggcatcgtgccgtcgctgatgttcggcgcgatcgacgacatcctgatgcatatgcggcggatcgcgccgacggtgcggatgctgatcgtcggtctcgtggcgttcctcggcgcggcgctgacctacgcctcgcacggctccgaaagcgggccggtgcagttcatcctctacgggctggtcggcttcatcccgggcgtgatcacgtcctggctggcgcacaaatacgccgaagagctgcatgcgccggcgcagccggtatcgcagcactaggacatgtattcgtaggcttcccgtggaaggcgtcagctcgttgtttgtgacaagttggtgacattgggcgccgcgatccctgtgcgatcgcaagctcaggtgactccagttcagtgtgggctgtgcgccggaatggctgagccggttgttgctgcgcagccacaatcgcggatgatctgcaaattcggcaatcctgtcgcttcagtccacattgcgtctaacgcggcaatctcctttaagttgcgacccggggcgttggtgctttctaatctgattgcccgacgggaaggctgggaatgcgcaagtttggaattcgggattgcggcggcgctctgcgtcgcttgacactggctacaggactgctgacagcgtgtgcgttgtggatggacgagccggcttatgccgcctgcacgcctgcgtccgccagcggagtgacggtgtcgtgcacgggcacgacaaccaatcagggcggcggcgcgcccggcaccagtggtccaagcacgattgggtacgggaccggcactgagagtggtatcaccatcaacattggcgccgggagcacgctcaccggcagttcaatcggcattaccattcacgacggaacggtgatcaatggatccggatccacaatctcgggaccaaacaacgccatcgtagctgtcggcaatctgtcgctgaccaacgaggcgggtggtgtcatcaacacctcgaatggcgcgaccgccatctccgtcagcggcgcagccaacatcagcaattcgggggtgatttcagggaacttctatgcggccatctatgccgcaagcgggtctgtggtgaacaccactggcggacaaatcaccggcaccggcgtcgggatgtacggcgggccgggtctcatcatcgccaaccaaggcagcatcagcggcgccattacttcaggcctgtcgctcgatggccattcggtcgtgatcaacgccgcgggcggcagcatcggtggtgcagtttacggaattttcggcgccgaagaggagaccatcattaatgccggctccattgcagccacttttcaagcaatccgcataggtggtggggcctcgatcttcaatgccggcactatctccggtggttctgccgcaattgtttttatcggtgcgaataacgtgctgacgcttgcacctggctcatccatccaaggcctggtgttcgggtctggcaacgacactatccagctcggcggcatcggcggcaacgccgtgttcgacctgagctcgatcggtgccgccaagcaataccggggcttttcggccttcgacgtggttggtgcgacctggacggtcaccggcacctacggacagaccaattcatgggcggtgaatgcaggcacgctcaatgtcagcggcgacctgtctgcggcagccaatctcagtgtggcgagcggcggcacgctgatgggtgcaggcacggtcggaacgacgcgcgtcagctccggcggcgtcttcgcgccgggcaacggcgcgccaggcacgtcgatgacagtatcgggcaatctgctgctggatccgggtgcgatctatcaggtgcaggtcaatccgtcggccgcatcctccgccaccgtcagcggcacggcgacgatcggcggcgccatcgtgaacgcggtctatgtccctggccggtatatcagcaagcaatacacgatattgagcgcaacaggtggcgtgtccggtacattcggctcgtctgtcgacaccaacctgccggcgaatttccactcggtattgagctacgacgccaacgacgcctatctcaacctagtcctgaactttgcgaatcctggcaatttcagcggcaaccagcaggcggtcagcaatgcgttgaccagtttcttcaacaacaacggcggcattccgctgctctacggctccctcactgccggcggcctggcgcaggtctccggcgagaccgccacgggctcgcagcagaccacattcgatgcgatgcaccagttcatgggcgtgctcgccgatccattcgcgggcaggggcagcggccttggcggatcgtcggcagcgaccggttacgcggaggaggccgatcagacgagcgcctatgcggcacgtcggggcggtgatgcgtttgcgatgttcaccaaggcaccgccggcggcgttcgtgccgcgctggaacgtttgggtggcggggtttggcggctcgcaatcgacgagcggcaatgccgccgtcggctcgaatgacacgacgagccgcattgcgggcacggccgtcggcgccgactatctgttctcgccgaacacgctcgcgggcttcgcgctggccggcggcggcaccagcttcagtctcaacacgctcggcggtggccgctccgatctgttccaggctggtgcgtacatccgccacttcaatggcccggcctacatcactgccgcgctcgcctatggctggcaggacatcactacgaaccgcacggtgacggccgccggcatcgaccagcttcgcgccgagttcagcgccaacgcctattccggcaggatcgagggcggttatcgtttcgtcgcgccgtggactggcggcgtcggcgtgacgccttacgccgcggccgagttcacgaccttcgatctgccggcctatgccgagcaggcgacctccggtctgccgagctttgcgcttcaatatggcgcccagagcgtgaccgacatccgcagcgaagtcggcctgcgcagcgacaagtctttcctggtgcaggacggcatcctgacattgcgcacgcgcttcgcttgggcgcacgactacaatccaagccgcgtggctgctgccaccttccaggcgctgccgggcgccagctttgtcgtcagcggcgcggcgcaagcaagcgagtccgcgttgacgacggcatcggttgaaatgaaatggcgaaacggctggtcggcggccgcgacgttcgagggcgagttctccggcgtcaccgcaagctacgccggcaagggtgtggtgcgctacgtatggtgatgcgcctactcgggcgaaatgagcatattgcagtcgggttagaagccaaggccaggcaaatgcatgcaaacgagcagaccattatattaaatttattaatgcattaggtccggggccgcaagccgggcaaaatactcttcatgcaatcgtcacatgattgtcatgtaaatgtagtcccaatgtcacatggccgcttttgtcctcccgtggccgtgaggggcgatccatgagtgatgtggcgttacctggttcgatcgagcctgcgcggcgtggcggtcccgatctcgagaagggctttcatcccctcaccggcatcatctatctcggcgtgatcggcgccgcgctgctgttcgtggcctacagcatctacgcggatgtcggcgccacgggcgccggcaagacctcctatgccgcgttcctgctgctgttcgtcgcgctgttgatctcgctcggtttcgagttcgtcaacggcttccacgacaccgcaaacgccgtcgcaaccgtgatctacacacgttcgatgccggcccatattgccgtggtctggtcaggcttcttcaacctcatcggcgtcctgctctccagcggcgcggttgctttcggcatcgtttccctgctgccggtcgaactgatcctgcaggtcggcagcagcgccgggttcgccatggtgttcgcgctgctgatcgcggcgatcatctggaatgtcggcacgtggtatttcggactgccggcctcaagctcgcacaccctgatcgggtcgatcatgggcgtcggcattgcgaacgcgctgatgcacggacgggaaggaacgtccggcgtggactggtcgcaggccgccaacaccggcaaggcgctgctgctgtcgccgctgttcggatttctgcttgctgcgatcctgctctacggtttgaagacggcgctgctgcgcgcaacgccggcgctgttcggcgagccgcaaggcgaccagccgcccccgtggtggattcgcggcatcctgatcctgacctgtaccctggtcagtttctttcacggatcgaatgacggccaaaagggtatgggcctcatcatgctgatcctgatcggcgtggtcccgaccgcttacgccctcaaccgcgcgatgcctgccggtcagatcgaggcgttcaccgcgaattcggccgcggcgagcaaggtcgtcgaggacaggggcgccgatcgcaaggtgaccggcgacccgcgcccggcggtgacgaactacatcgcgtttcgccgactcaccgacgacacctatccgtcactcgccgtcctggtccgcgaaatcagcgaccaggtcacccagtacggatcgctggccaaattcccggccgagaccgtccgcaacacgcgcaacgacatgtatctggtgtcggaagcgctccgcctgctcatgaagagcagcgacaacgggctgagcgatgccgatgttgcgacgctcaaccgctacaagggctcgctcgatgccgccaccaaattcatcccgtcctgggtgaagatcgcggtcgccatcgcgctcggcctcggcaccatggtcggctggaaacggatcgtcgtgacggtcggtgaaaaaatcggcaagacccacctgacctacgcgcaaggggcttgcgccgagatcacggcggccgcgaccatcgctgcggcggacggatacggcttgccggtgtcgacgacgcacgtgctgtcgtccggcatcgcgggcaccatgaccgcgaacgggtcaggcctgcaatggtcgacgatccgcaacatcgcgatggcctgggttctgacgttgccggtggcgatgctgatctcgggcattctctacttcgttttcgcgcatttgttttagcagtaccgcagaaagggatttcgagtggcagatgcaagcttcagccttctgacgggcaacagtatcgaaacgcgcctggtccgggccggcggcgtcatttttcgcgaaggcgaacaggctgatgagctcttcgtcatcaagagcggctatgtgcgcatccaggtcggcaacaagaccatcgcggacctcgcgcccgacacgatcttcggcgagatggcattgatcgacaacgagccgaggagcgcgaccgccacggcgctgacggatgtcgagctcgtcccggtctcggaaaagcagtttctcttcctcgtcagccagacgccgcattttgcgttgaaggtaatgcggacgctggcgcagcggctcagaagcatgaacaagggcgtgttctaaagcgcgatgagaccgggttgaatcgtcatcgcgctttagccccctgtttgagcatgatcttttcggaaaaccgcttcgcacttttccggatcgtgctttaggcggccgcgaaggcaacgggccttgaacgtgacacagtggtaatgtgaagcagcttgaaccgcctgcttgcgttaccatgtgatggccatgcccgaggacgacatcttcacgccctatgccacgcgatcgcggccgcccttcggcggcgcgcaggcgcgcggcaaggtgatcgatcaggacggacgcgagctcggcggtgatccgctgcatcccccgttccaaggttttcaggaaggcttccgcttcgacttccgcaactcgagcgccaatccgttcggcaatctgacccgcgagcagcggctggagcggctcgagatgatcgcaaagctgctcgacgtcgccttcgtcttgccgggcaccaatgtccgctacggcatcgacgggctgatcggcctgatccccgtggtcggcgatctcatcacgactgcgatctcgttgtggctggtgcgcgaggcgcggctgttgggcgcgccctggcacatcaccgcgcggatgctcgccaatgtcgccgtcgatggcgtggtcggcatggtgccggtggcgggcgatgccttcgatgtcatgttccgcgccaacatccgcaacgtgcggatgctgcgccgctggctcgacaagcagccgcgataggcgcatgacccggaaaagggggcggcggttttccgatcaggtcatgcgcaggaagagttcttcgccaaaaacaaaagcccccggacaatccgagggcttttcgttgagggaggagcagaaagcttatgcggcgtcggcgtcggtctggctggcggcggggcgcggacggcgcggcagcgggaatgcctcgctctcatagagcgagcggatgccgttctgatcgaaacgggcttcctcgacctgaagataggctccgttcagcgaatccgccggcagctgctccatcgcgaactgcacggcttcggcagcggtgccgaaacggcggtacgcgaagcccgcccgcttcttcttgcggatcgcggcaggaaacagttcggcagacgtattgtagttgaacggacgcaggggacgcatggtcgacgacctcttgtgctcttgtcagttggcgtggcgaaagggatttttggggacgacggcctacaatcggcagcgcgccgtacatgtcatttcgatccctaatataggcctctttgacaaaaatgcgaccccagaagcgcccccggcagggcacatgctgaatccgcgcatggcatgaggtccggtcaaataagtctatttatttcaatgacttatgactctcagatcttgtcgagccaggccaggatcacgaccacgatcaaaatcaccccgaaaaggcccattccggagtggccgagaccgtagccatagccgcggatccggccgctatagccgcccaacaggataaccagcaggaggatgatgaggatcaatccgagcgacatggcgccctcctcagaacaggcggcagccgcacggcgagacgccgacggccccgcggattccaagcaaagcacattccgggccgcgagtcgttaatcgctcgggccgatcacgaggatattgttgggccctcgaggcaaagcaaagccccgcgcgaccggttggtggtcgcgcggggcttgggtagtggccgcctacttcgtctcgttcagcttcagcgccgccgagttgatgcagtagcgcaggccggtcgggccggggccgtcgttgaagacgtggccgagatggccgtcgcatttcgagcacagcacctcggtgcggatcatgccgtggctcacatcgcgctcctcgtcgacgtggctctcgatcgcgggcttggagaagctcggccagccgcagccggaatcgaacttctggtcggactcgaacagcgtctggccgcagccggcgcagacataggtgcccttgcgcgggtcatgttcgtattcgccggtgaacggccgctcggtcgccttctcccgcagcacggcgtactgcatcggcgtcaattccttgcgccactcggcctcgctcttgcggaccttgccgtcggtcttggtatcggacattcaacctcctttgcgagctgctcagttggtgaccttggtgctgctcaccagcgtcggcttctcgacgtagttctccgcgaagatcttcttcaggttctcgaccttcgggatgtcgttatacgcgatatagggctggttcgggtgcagcgtcagatagtcctggtggtagccctcggccggatagaacgcctcgagcgttccgaccttggtcacgatcggcttcttgtagaccttggccgcgttgagctgggcgatataggcgtccgccaccttcttctgctcctcgctggtggtgaagatcgccgagcgatattgcgtgccggaatcggggccttggcgattcagctgggtcgggtcatgcacgacggagaagaagatctgcaggatcttgccgtaggagatcttctgcgggtcgtacttgatttcgacggactcggcgtggccggtggtgccggtcgagaccttctcgtagtcggcattcgccttgctgccgccggagtagccggacaccgcgctggtgacgccggcggtgtgctggaacacgccctggacgccccagaagcaaccgcccgacaggacggctgtcttgatgccgctctcatgtgcgtccgccgccggcggcgggatgatcacggcgtcctcggcggcaagcgagggcgcgattgcaaaggcggccacggccagcgcgccgatcgcggcggcgcaaagcgagaggcggctgagggagctcttgggcatgggttcctcgtgggatcgcaatttaagggccagtctagagcgggcgccggcattggcaaaccgggccggctgctccgacgcttcaaaatacgggcgaggggccgttttgttacggcacgggccacacggtttcgtgagggaaatcagcgaggttcagggatgacggtgatggatttttgcccgcgggcccctccacgcacgtcgtcctggcgaaagccaggacccataaccaccaaatgtaactgtcggcgggatcgtggccccagagcgtcccgcagcaacaagcagccggggtaacgggtcctggctttcgccaggacgacgctgaatgttggtgtcacgcactcatctgctgtcaggatgacgtcggcgcctgcggggccatcacaccaccacgctcagccgcttcgccgcccgcgtgatgcccgtgtacagccaccgcgcgcgcgagtcctggaacgcaaagctttcgtcgaacagcacgacgtcgtcccattgcgagccctgcgacttgtgcacggtcagcacgtagccgaagtcgaattcgtcatagggcttgcgctgctcccacggcacgccctcgacgccgccgtcgaagcattcgccgcgcaccgagactttggtgaccttgtagccgaaatcctcgtccggcatcacgcgcatggtgatgatcttggatttcgactgcgcgcgcgccttgacccgccacagcccgccgttgaacaggcccttcttgcggttgttgcgcaggcagaccagcttgtcgccggcgacggggaggggatcctcgatgttcagccgctgccgcacccgcatgttgtaggcgcggcgggtgttgttgcgcccgaccagcacctggtcggcgctcatcacgcggtccggatcgagctccttgcgcgacaccacctcgctctcgccgtggcggccgatctcgagctcgcggccttcgcggatatccatcgacatccgcacgatcggatcgtcctgcgcctggcgatgcacctcggtcagcatcgcgtccggctcggcgtcggtgaagaagccgccgccctggatcggcggcaattgcgcgggatcgccgagcaccagcagcgggcaatcgaacgacatcagatcgcggccgagctcggcatcgaccatcgagcattcgtcgatcacgatcagcttggccttcgatgccggcgcgtcgtcccagagttcgaagctcggctgctcgacgccggactcgcgggcgcggtagatcagcgaatggatcgtggacgcgctgtcgcaccccttgttgcgcatcaccagcgccgccttgccggtgaaggcagcgaacttcacctcgccgtcgacgccctcggcgatgtgctgggcgagcgtggtcttgccggttccggcatagccgaacaggcggaacaccggcggcgtcccgttctgaccgggcttggctttcagccagtcggcgacggctttcagcgcggaatcctgatgcggcgtaaaggtggtcatgagctttcggaagggtgagcgcgcgatcaataacgccgcgactcagctccttacaagctaaccattcgtgcgttccgatcaagccggcttccgctgcgcggaattggcgtttcactcccgaggctagacttggtccggagcagcactagactgcctgaaaacaacaagtggtcgggccacgatagatggacccgaccttgggagtgacgccatgaaattcggcatcttctacgagctgcaactgccgcgcccctggaatgacggcgacgagctcaggctctaccagaatgcgctgacacaattggagaccgccgaccggctcgcttacgattacgcctgggtcgtcgagcatcacttcctcgaggaatattcgcactcgccggcgccggaatccttccttgcggccgcgagccagcgcaccaggaatatccggctcggccacggcatcttccagctcaccaccaatcatccggcgcgggtcgccgagcgggttgcggtgctcgatctcctgagcaacggccgctgcgaattcggcatgggcgagagcgcctcgatcaccgagctgacgccgttcggccgcgacatggagaccaagcgcgaggtgttcgaggaagcggtgcaggcgatcttcccgatgttcaccaagaccggcaccgagcatcacggcaaatatttcgacatcccgttgcgcaatgtggtgccgaagccggtgcagaagccgcatccgccgctctggatggcctgctcgcagctgccgaccatcgaacgcgccgggcagaacggattcggcgcactcggcttccagttcgtcagcgccgaggcggcgcatgcctgggtgcacgcctattacaatgcgatcaccaagcggctgaagaagctcgccgactacgagatcaatcccaacatggcgctggtttcgttcttcatgtgcgcggagaccgacgaggaggcacgtcggcgcgccgacggcgcgaccttcttccagttcgcgctgcgctattacggccaggcgcagaaccggcaacgcccggcgcccggcaccgtcaacatgtgggacgagtacaacaagtggaagcgcgacaatccggaggcgcaggaggccgcgttgcgcggcggcctgatcgggtcgccggaaacactgcgcaagaagctgcggcgtttccgcgcctcgcatatcgaccaggtgatcctgctcaaccaggcgggcaagaacacccatgagcacatctgtgaatcgctcgagttgttcgggaaagaggtgatgcccgagttccagcacgatcccgagcacgaggcctggaagaggggggtgcttgacggctcgatccagctcgaggagatcgacacccaggcgttctcggaccgttatggtaagctcgcggtcaatgtcggcccgaagaccgcagccgcaggcctgatgaattaatgtgcagcgacctcgcaatcgcgtgaagaaaataattcgctacgtgcgacctgtgccttgaacgaaacggcacgcgcgatgcctgcaccgaagtgcaggcatcgctatttttgtgcggtgctcgacagcttcattcgcgcgccccatcatcctgacatcgcatgatcgcgcgcccggtagcgcgtttgatcgtcaggagattcttggaatgaagcgtcgtgagttcctccagctgtcgctcgccacagccgcatcagccgcgctgtcccgtggcgcgcaggcgcaggcggactcgaaggaaattcgtatcggctaccagaagaacggcgtgctggttatcacgcggcagcgcgagtccttggaaaatcatttcaagccacagggcgtcagtgtgaaatgggtcgaattctcgtcgggcccgccgatgatggaggcgatgaatgtcggcagcgtcgattacggcgcagtcggcgattccccgccgattttcgcccaggccgcgggtgcggcgatcgtctatgccgcggcccagcccatcatcaacggatcgggcatcctggtgccgcagaactcggcaatcaagaccattgccgacctcaagggcaagcgcgtcggcttcaccaagggatccagcgcgcataacgtcgtgatccagaccctggagaaggccgggctgacctataatgacatcacaccggtctatctgacgccgccggacgccggccccgccttcgccaatggcggcatcgatgcctgggcgatctgggatccgtatttcgcgatcgccgagaccaagcagaacggccgcattctgatcaatacaagcgacgtcaccaagaccaacgcgttctacatcgccaaccgcgacttcgcgaacaagcacggcgcattgctgcagcagatcgtcgacgtcacgacgtcgagcgcgaagtgggcggaggcgcatcccgacgaggtcgcgaaatcgctggctgccgtcaccggcgtgccgctcgatatccagaccatcgcggcgcggcgggccggcttctcggtcggccccgtgaccgatgacgtggttgcaacccagcagggtgttgccgatcgctttttcaagctgggcctgatcccgaagcagatcgcgatccgcgacatcgtctggcgcaatacccagacctgatcggcgtgtgattggtcattgcaatgcagaggaatttcccatgacgcgtttgttccggcgctgggtcgcccgcgcggtgatatcggtcagcatcgtcgcggcgacggtcggcgcgtcctacggtcaggacaaggtggtccgcatcggcttccagaaatacggcaagctggttttgctcaagagcaagggctcgctcgagcagaagctgaagtcggtcggctactcggtcgtctggaccgagtttccgtccgggccgccgctgctcgaggcgctcaatgtcggcgcgatcgatttcggcaacaccggcgaggcgccgccgatcttcgcgcaggccgcgggcgcgccgatccagtatgtcgcctacgagccaccggcgccgaaaggcgaggcgatcctggtgccgaaggacagcccgatcaagtcggtcactgacctcaagggcaagaaagtcgcgctcaacaagggctccaacgtccactatctgctggtgaaggcgctggagaaggccggcgtcaaatattccgagatcgagccggtgttcctggcgccggctgatgcacgcgcggcgttcgagcgtggtgcggtcgatgcctgggtgatctgggatccgttccaggccgcggcagaagctgcgaccggtgcgcgcacggttgccgacggcaccggcgtcgtcgccaactaccagttctacttcgcctcgaagaagttcttgcaggccgatgcgaagatcgtcgagctggtgctggcgcagctcagcgaagtcgatgactgggccaagagcgatatccacgccgtcgccgaacagctggcgccaaacatcggcctgtcggtgccggtggtggaggtcgcgctgaagcggcaggcctacggcatcaagccggtcaccgatgccgtcatcgcggatcagcaacaggttgccgacacgttcttcgcgctcggcctgatccccaaacaaatcaagatttccgacgtcgcatggaggccgggcacgtgagcaccccaaccaacgccaacatcctctggttcctgccgacccatggcgacagccgctatctcggcacgtcgatcggcggccgcgaggtgaacttcaactatctgcgccagatcgcgcaggccgccgaccagctcggctattacggcgtgctgctgccgaccgggcggagttgcgaggactcctgggtggtggcctcggccgtcgcgccctggaccgagcggctgcgttacctcgtggcggtcaggcccggcctgcagtcgccgagcgtcgccgcccgcatgaccgcgaccttggaccggctgtcgaacggccgcctgctgatcaacgtcgtcaccggcggcgatccgatcgagaacaagggcgacggcatcttcctcgaccacgacgagcgctatgcggtgacccgcgagtttctcaacgtctacagcgatctgctcgcgggcaagacggtcaacgtcgagggccagcacataaggatcgaggacggccgtctgctgttcaatccggtgcagtcgccgcggccgccgctgtatttcggcggctcgtcggatgccggcatcgacgtcgcggtcgacaccgtcgacaagtacctgacctggggtgagccgccggcgcaggtcgccgagaagatcgccaaggtgaaggcggttgccgcgcagcgcggccgcaagctctcgttcggcatccgcctgcacgtgatcgtgcgcgagaccaatgccgaggcgtggaaggcggccgacgagctgatccagtacgtcaccgacgacaccatcgctaccgcgcaaaagatcttctcgcggatggattcggtcggccagcagcggatggcgcagctgcatggcggccggcgcgaccagctcgagatcagcccgaacctgtgggccggcgtcggcctggtgcgcggcggtgccggcaccgcgctggtcggcgatcccgagaccgtcgcagcgcggatcaaggagtatcaggagatcggcgtcgatacgttcatcatgtcgggttacccgcatctggaggaagcctatcgcttcgccgagctggtgttcccgctgctgtcgcttgcgcacggcaacaacgtgacgtcgatcagggtcaacaccgggccgttcggtgagaccatcggcaacgaatatcggccgcagaaacaggcgtcgcaatcatgagcttgatcgattcactcccgcgccgcaaagcgttttcgagcgaggtgggtgccggttcgcgtgaagaaaacacgtcaaaccaaaaatctgaagctccgatccgatccgatcggaacggaagcagctccagcgttctcaaattgcccagggtcgacggcctgatcccgtggatcgtgccgctcgcgatcgttctgatctggcagcttgcctgcgtcaccggctacgtgccgtcacgcgtgctcccggcgccgaccgatgtcgcgcttgcggggtggaagctgctgctctcgggcgagctggtccgcaacatctgggtcagcttctggcgcgcctcgatcggctttgtgatcggcggcggcatcggcttcgccttcggcctcgccaacgggttgtcgcaactatcggcgaagctcaccgacaccacgctgcaaatggtgcgcaacatcccgcatctggccttgatcccgctcgtcatcctctggttcggcatcgacgagtcggccaagctctttctcgtggcgctcggcgtgttcttcccgatctatctcaacacgctgcacggcatccgtaccgtcgatccgcagctgatcgagatgggccggatctacggcatgaccgacggcgagctgttccgccgggtgatcttccccggcgcgttgccctcgatcttcgtcggcctgcgctttgcgctcggcatcatgtggctgaccttgatcgtcgcggagaccatcgcggcctcgtcggggctcggatacatggcgatgcaggcccgcgagttcatgctgatcgatgtcgtcgtgctctcgatcctgatctacgccttgctcggcaagctcgccgacagcgcctcgcgggcgctggagcggctgaccttgtcatggcatcccgccttccagaagaagtgagaatgagaatgcaagaagcgcttcgtttccaggcggtggacggcgagccggtcgaccgcgccgacattgtcgtgcaggcgcggcagctgcggcgagcgcccgaagccgcggcgcgcggcctgtcgctgaccatccgcggcctgcgcaaggcgttcggcgacaatgaggtgctgcgcggcatcgacctgcacatcccggccggccagttcgtcgcgatcgtcggccgtagcggctgcggcaagagcacgctgctgcgcctgatcgcgggactcgacgcgccgaccgcgggcagcatcgctttcggcgaacagccgcgggctcaggatgtccgcgtcatgttccaggagccgcggttgctgccctgggcgcgggtgctctccaatgtcgaggtcgggctggggcgcgagcgttcctcggccgatgcgcaggcgcgcgccgagcgcgcgctggtcgaggtcggcctcggcgacaagcgcggccagtggccggcggtgctctccggcggccagaagcagcgcgtcgcactggcgcgggcgctggtcagccagccgcgtgtgctggcgttcgacgagccgctcggcgcgctcgacgcgctgacccggatctcgatgcagcaattgctggagcgggtctggcgcgaccaggactttaccgcgatcctggtgacgcacgacgtcgccgaggcggtcgcgctcgccgaccgcgtgctggtcatcgaggacggccggatcgccgaggatgtcacgatcgacctgcggcggccgcgccggcgcggttcggccgagctcgccgcgctggaaggcgagatcctgaagcacctgctcgagggcagtgaagacacatccggtctgtgaggtcgccatgaactccgtcgtgcgcaatgtttcgatcgaacccgcggtcagcgccgccgactttcgcggcgcgatgcgccatctcaccggcggcgtcagcatcatcacggccggtaagggcaaggacatctcggggatgacggtgacctcggtgtcgtcgctgtcggtcgagccgccgtcgctgatcgtcagcatcaaccgcgccgcctcttcctggccgctgatcgcgcgtcacggcgcgttcggcgtcaacattctgaacgcagatcagctcgagatcgccgagcgtttcaccggcaagggcggcctgaagggcgccgagcggttcgaaggtgccgaatgggcgacgcgcgcgacgggtgttccgttgctggtcggcgcgctggcggcgatcgactgcgaggtcgaggagatcatcgagcggcattctcatgcaatcgtcatcggccgcgtgctcgatgtgatcgcatcggaacgcaccgccgcgctggcgtattggcacggcgaatacgtcgcgatcgaccgcgacgaggacgccgccaggctggccgaggtcagcctgccatcacggcacgtccacgcccgggacgtgggttaggctctgatccgcgcagccgcgccgcccgtccggatctgcctttaaagcgcgatgatatttggttgaatcgtcatcgcgctttagctcttgtttgagcatgatcttttcggaaaaccgcttcgcacttttccggatcatgcttcagaggaccgcgctcagcgtcgccgggctgtcgatgatcacggtgctgccgcggacgccgtaccagaccgcctgaacggactgggccgcgttggcgagcgggatgccgacgaccagcgtggtcgggatgcggcccgaactgatcggcaccggctcattgtaggtgaagctcgccacgactggcgaaatcgcgccgttgacgctgacaccgaatgtgccgcctggattttcgttgccggtggcatagggcatcggaacgttgagggtgatgacggccgtggtgccgacgccttcgggaatcgtcagagcgaggccgggaatcggcgtccaggtgggggcattcgtcgaatggttgccgctggtctgcgcgtaaagagccatatcactctccagttgtctaaaagtaaaatcacaataggagattgaatacggcaaccggccgcaagattcaagggatcaacggcagggaggccggcgcagcatgttggccgtggcggttttccggcaagcgcactaaaagccgcggatatttcggagacgtgacggttcgatgaagcgcctgggagcctggctgttctatctcgtgggtgcgatcgccgtcgcctatctcgcgctctatgcctatgtgaccttcaccggccgcgacatcacgccgggcgatccgatccggatctttcgcaagcctgatgcgccgaactattcgtgaggcaaggcacgcagcgggatttccccgccgcttgcttgctcagccggcgttggccatgcgctgatagtcgggcgcgccgttgccggccggggtgatcgggatgccgccgtcggcatattcgttcagcttgttgcgcagcgtccggatcgagatgccgaggatgttggccgcatgggtgcggttgccgaggcagtgcttcaaagtttccaggatcagatcgcgttcgacgtcggcgacggtgcggccgaccagcgcgcgggtgacctgctcggcggccagcgtcgcatgcgccaccgcgggcgcggtcttggcaaggtcgaggcggtcgccgtcgggggtcaggatcgcatcggggccgatctcgtcgccttgcgccatcagcaccgagcgatggatggtgttctcgagctcgcggacgttgccctgccagcggttcgcggtcaggacgcggcgggcctcggcggagatcggacggaccggaaggccgttggcttcggcatatttcttggcgaaatgctgcgccagttcgaggatgtcggccggacgatcgcgcagcggcgggatcttcagattgacgacgttgaggcggaacagcaggtcctcgcggaagctgccttcgcgcaccgcctcggacagattgcggttcgaggtcgcgatgatgcggatgtcgaccggaaccggcctggtgccgccgacgcggtcgatcacccgctcctgaatcgcgcgcaacagctttgattgcaggcggacgtccatctcggagatttcgtcgagcagcagcgtgccgccggtcgcttcctcgaacttgccgatccggcgggccaccgcgccggtgaaggcgcccttctcgtggccgaacagctcggattccagtaggtgctcggggatcgccgcgcagttgatcgagatgaacggccgcttggcgcgggccgagcgcgagtggacatagcgcgccagcacttccttgccggtgccggactcgccggtgatcatgaccgaggcgtcggagcccgcgatctgctgcgccagcttgatcacccggcccatcgcctcgtcgcgccagatcaggtcgcgcgcgtcgttggcgaccgcggcgagcacggctgcgatcagctcggggtcgggcggcagcgggatgtattccttggcgccggcgtgaatcgcggcgaccgcggcgcgggcgtcgttggagatgccgcaggcgacgatcggcacgtggatgtgctcggcctcgagccgcatcacgagatcgcggatgtcgaggccgacatcgaccagcagcaggtcggcgcccttgccgccgcgcagcacgttcatcgcctgttcggcggcctcggcgtgggtcaccgaggcgccgttgtccatcgcgatcttggtcgcggtcgtgagctggcccttcagggtgccaacgatgagaagccgcatgatgatctcctgttcgtctggtcgcgcaggttccgcgcgctaccgttgcattcgtttaagagcgttctgccttgatgatttcggtcatggtcacgccgagcttgtcttccaccagcaccacttcaccacgcgccaccaggcggttgttgacatagatgtcgatcgcctcgccgacccggcggtcgagttcgagcacggtgcccggcccgagcttcaggaggtcgccgacgtccatcttggagcggccgagcaccgccgaaacctgcaccggcacgtcgaacacggcctcgaggtcggccgcgatgcgcgcggcattttcgtcctcgttgtagccgatgtcgtcgatcccgggcgcatcggcggcgttgagatcgggaagcgggacgtgggtgtcggtgtcgctcatggttcagccctcaatcgccttcagccggcctggccgcgggacgccagatagcgcccgacgagttcgttgatcttgccttcgatcgcggcgcgctccagcacgacgccgccgtcagcccattcgatccggcagtcgccggtcgcgatggtcggctcggccaggatcaccagccggccctggaagcccgaatgcgccgccatctgctcgatgttgtgatgcgccgcctcatacagcgcgtcgttgatgcggaccacgagatgcggcgtcgccaccagatgcgagaagcagtcgctgaccaaggcggtgatctcgccgagcggctcgcgcgcgaccagctcattgcagagcttgcgggcgaccgcgacggcgacgtcgaccgcctcggtctccatccgcgtctcgatgccggcaaagcgcgccgcaatgcccttgatcgcggtgccgatctcttcgagtgcctgcgcggcgcggcggtcgctctcgaccttggcctcgcgcagcgcggcctcgtagccggcgcgataggcccgggcctcggcgtcggcgaccttctgggcgacctcggcgggtgtcggcgcgcgctcgcgggcgcggtccggggccgagaagtcggtgtcgaacaggaattttgcaggtgcggccatcagtacaccagctcgtcgtcggcgcggttcttggtcagcgtgatctcgccgcgggcggcgagatccttggcgaggttgaccaagagcgcctgcgcctcgtcgacgtcgcgcagccgcaccgggcccatcgccgccatgtcgtccatcagcatcttgccggcgcgcgaggacatgttgccgaggaagaagctgcgcacctcctcattggcgctcttcagcgcgacgccgagcttgtccttgtcgatgttgcgcatcagggtctgggccgaggcggagtcgagcttgatcaggtcgtcgaaggtgaacatcagcgccttgatgcgctcggcggattcacggttctcttcttccagcgaggtgatgaagcgggtctcggtctggcggtcgaaattgttgaagatctcggccatcacctcatgggcatcgcggcggcgggtctgcgacaggttcgacatgaactcggtgcgcagcgtctgctcgacgcgctcgatcacttccttctgcaccgcctccatccggagcatgcggccgaccacgtcgagcgcgatgtcttcgggcaggattgcgagcacccgcgcggcgtgctccggcttcagcttcgacagcaccacggcgatggtctgcgggtactcgttcttgaggtagttggcgagcacctcttcctgcacgttggagagcttctcccacatgttgcggccggcggggccgcggatctcgtccatgatgccggtgacgcgctcggccggcagatattgctgcagcagccgttcggtggcgtcgaaattgcccatcagcgcgccggaggccgacatccgcgagacgaattccagcatcaggtcctcgaccacgtcggcctcgacggtgccgagcgtcgacatgtggaccgacagctcgcggacctcctcgtcgtcgagcatcgaccagatcttgccgccatattgttcgccgagcgcgagcatcaggatcgcggcgcgcttcgggccgggcagcggcttgcctttgggccgggcgctctgccggttcgccagcgtcgacaggacggtggcgatatcgttggcgttggtggtctggggtacggcggccatgtcagttctctaccggctcgctcagccattgacggacgatggagacggtctcgttcggattgcgctcggcgagctcgccgacccggtgcacggcctgggcgtgcacctggccctggatctgggccacgtcgatcaactgcgccgtgccgctgccgctcgggatcagcgcctggccggtcgccccggcgctctcggcatgggcttcggcgagcgcaggcaggccgccgccggcgagcgacggaatggcgtcggccgcgacgatgcgcttgaccagcggacgcaccaccatgaacagcaccaccaggcccagcatcatcatgacgccgagctcgatgacgtacatcacgtcatccttggtgaattgcagcatgccgagcaggccggtcggctcgctgatcggctgcgaggcgggcggctcggcgaagcggaggttgacgacctcgacctggtcgccgcgcttctggtcgaagccgatcgcggaacggaccagggcggcgatgcggtcgagctgctccttggtgcggtcctggtagaccatctcgcctttttcgttcttggcgtaggcgccgtcgaccagcaccgcgaccgagatgcggttgacgcggccggcctcggtcacctcggtcttggtggtgcgggagatctcgtaattgttggtctcctcgctcttcttgctctggtcgcgggcgcgggcggcgttgtcctggttctggctgcccggcagctcgttggcgacggtgacctggccggaattgtcggcggtgaggctcgattcctcgcgggtctgggtcgagcgcagcacgcggccttcggggtcgaacttgtccgaggtctgggtgatcttgttgtagtcgaagtcggcggagagctggacgcgggcgcggccggcgccgaccaccgaggagacgatgtcctcgacctgcttgcgcatccgcttctcgaaggcggcgcggcgctcgtcgccaacagcggcatcggcgtcggattgggcgccgtcggcgagcagctggccggcttcgtcgacgatcgagacccgttgcggcttcagcccgttgaccgcggaggcgacgacatggcggatcgcgcggatctgctgctgctccagcgcgccgcgcacccgcagcacgatcgaggccgagggctccggcgtctcgcgcgagaacagcggcttttccggcagcacgaggtggacgcgcgcggcctggacgcggtcgatggcgcggatggtgcgggcgagctcgccctccagcgcgcgcagatgattgatgttctggacgaagctcgtggtgcccagcgcgtccgacttgtcgaagatctcgtagccgacgccgccgcccttgggcatgccgccctcggcgagcttcatcctgagccgcgtcaccttgtccttcggcaccatgatcgcggcgccgtcattgcgcagttcgaacgggatcgcctggcgctccagctccttgatgatggccgaggaatcctcggtcgacaggtcggtgaacagggtggtcatctgcggcgtggtgacgcgcatgatgacgaacgcgaagaagccgatcagggccgcagtgaccgcaaccatggccgcgaggcgggccgcaccaagacctctcaggaaagcaaccagactttgcaccaacggcccccagggattcggcccgcgtgggtccgactgggcaaatattgcctagggtatggtttccatatggttaacgaaggttaagaaccgcggcaaaaacgcggacatgaaaaaaaccggcttcgcagagcgaggccggttttcgtcaaatgccacggatattggcagggttactgccggtattgctggatacgtgtggtgcgcagtccggccagaccatgctggtcgatcgagaactgccaggaaaggaattcatcgacggtcagcgtatagcggctgcaggcctcctcgagggagagcaggccgccgcggaccgcagcgacgacttcggccttgcggcggatgacccaccgtttggtaccgggggccggcaaatccgcaatcgttaacgggctgccgtcaggcccgatgacgtatttcaccctcgggcgatggggttctgtcatggtgtactcacaaactctcaaccactgaactcgcgattggtaacctacgcctcccggtttaaaatttgcctaagcccaagcgttcaatacgaatctcgttggaacggccgggaacaggtggccgggaaggggacggcgagggagcggatcggctgctggacaggcggcttcgcagggtttcgtcgggcaacggagcaagcggtacccctctccctaaccctcccccgcaaggggggagggaacccgcccgccggtacgtccctcacaaatctgacgtgtaatgactcgcgccaagtgaggtgagcacaccagtcaggctcactccccccttgcgggggagggttggggagaggggtggccccgggcgagatgctcgatcggaagctcgcttccacaatctcgccccgccgaacgtgaacgatcgtcgtggttcccgcctcttcaactatccttgatctccgcactcggagcgacgccgcgcgtaaccgcgcgcggttgcctgcgtaggaatgattgtctgctcgccgcagatcggcgcgcatcgccaatcctcccattcgggtccttgtcatgatgatgaacagacgcgctttctcgaccgccctgcttgccggtgcggcagcttcactggtgtcctcgcgcggttttgccgcacccacgctgccggtgcaggcgcgcaatgtcgtgctggtgcacggcctgttcgccgacggctcgtgctggtccgaggtcattccgcgcctgcaggccgccgggctcaacgtgacgtccgtgcagaatccgttgaccacgctgccggaggcggtcgcctcggcgcagcacgtgctcgatcgccaggatggcccgaccgttctggtcggccattccttctccggcatgatcgtcaccgaagccggtgtgcatccgaacgtttcggcgctggtctatgtcgccgcgcgcgcgcccgatgcggatgaggactacaccgcattggcgaaaacctatccgacgccgccggcgagcgccggcatcgtgttcgacggcgacgagggccggttgagcgaagccgcgttcctgcgcgatttcgccggcgacctgccggaagccaaggcgaaggtgctctacgccgtgcagcagccgttccacaagcaactgcttactggcaggaccagccaagcggcctggcgcagcaagccgagctattacgcggtctcgaccgaggaccgcaccatcaatccggatctcgaacgcttcatggcgaagcggatgggcgccaccacgatcgagctgaaggccagtcacctcgcgctgatctcgcagcccgacccgatcgcgcggctgatcctcgacgccgcaggacggccggagtgagtgccagctccctccacgcatcaataacacagcggccctggcaacgctgagcgttcccagggccgcttggcatgcgctctataagatatgcgcaccatggctgttgagaatgccgtggtcacccgtgagcgggatcaggtcatggacgaccgcatcgacatcgaccggcgcgttcgcggtattgccggaggcaacgttgccggccagcgcatggctgagattgagtccgccgagcaggttgccgaccaacccgtccgcgccggctccgccgagcgatggaatgctgagcggaccattcgtgccggtcagcgcgccgagatcgagcagatgcggtccgttcgcaccgacatcgacggcgttgacctcgacggtgtgatgatcgcctgaggtcggcgcggcaaggatatcgatcgcctgtccgttcggttgcgtcggaccgacgtcgagagtgacgagatggccgctgttcgggttgccgaggctgccgacgattccgccgagcagtccgccgtcgccggcattgttcccgccattcgccgtcaccagcggcaggctctgcaggtcgtggccgacagcctggatcagattgtcgacgggattggtcgggtcgtcctttccactgacaacaccggtcaacaaattggccggcacggcatcgactgcgtgcacggtatcggtgagatcggcgccgagatgcgtcaccgcatcggtcgcatggcctgcgaggacgtcgccgggcgtgttgagcagatcggtcaagagattgctgtgcccgtcggcagcgggcggagcgccgagttgtccgagcccgaccgtgccggcgagattggtgacggcgtgaaccgcgttgtcgaggcccgcctcatgcccgatcgtcgtgagaagaccgcttgcgtcggacgcgccggcgttgaccgcgttcagcaccggttgcagcaatccgtgctgtccggcgagcaccaggccgttgccttggccgagaccggccggcagcgcgccgatcgcattcacggtatcggtgaggtcggcgcccagattcgtcacggcgtcggaggtgtgacctgccaggacgtcgccgggcgtgttgagcaggtcggtcaggagattggaatggccgtcggcagcgggggtggcgccgagctgtccgagtccgaccgtgccggcgaggccggtgatggcgtggcccgtgccgtccagtcccgcctgctgcccgatcgtggtgagcagaccggctgcgttggacgcggccgcgttgaccgggttcagcaccggctggagcagcccgtgctgtccggcgagcatcaggccattgccggggcccggtgatccgccgcttccggaacctccgccgctggagctgccgccgcctgaagaggtgttgccgccacccgagccgctaccgcccgaagcgccaccgcccgacgagccgccgcctgagctgccgccaccagaacttcccccgcttgaagtgccgccacctgagctacccgagcctgaagctcccgcacccgaggagcctccgcccgaggcgccggaacccggtgatcccgtcatgccgcccgacgccgagccaccgcctcctgcatccgcgccgccgccgtctgccgattgtcctgatgatccggagctgcctgatccggacgaggagtctccgggagccgtgccctgtcccatggccaaatattgatcagcatacgcattcgggtcgctcatgtggtttgcctccgtgttgcgtctaaccggagcaaaaaccgtggtttgaacggattggttgcgtcgcgcgcgcgcttgtgcccgaacgtggcaaacagccgatgtgcggcacgattcaaattttcatcaagcgagcagatgatgacggtgggcctcgatgcgcgcggccccgcgggtgaccaatccgggatgggtcgctaggcgccggggtgtggttcgtcgtgccggatcacttgccgctcagcgccaagcagataaacaccgatcccgacgaggaacgcgagcgaccagacttcccaaacggcgaatttcaaatggatggcgattggaagcgatgcagccgccatgcaaatactacccaatatccgaggaaacatggtgtggctctaacaggtttctgaaactgcgatggaggtatcgagctccggatggtacggacgctcacttacgcacagctgacacggcgacgccgcccgctcgttgcggccggtttctccgcagagatgcttactgtttcctgaagccgccaggcatggacgccgaaccggccggccttgcgatcagcgctgccggcagttcgggatgcaaatttctcttggctggcggtcagggcatccgctctgcccaaacgagatgaatgtgcaaccagattacggatcgctgcaaattgtcgggatacgcatcgggcggctgccccgaaatcccggctgcgctcttactcgccggcggccggcggcagccgctcccggagcgccgcgatctcgagcatgacgttgatggcgattgtcttgaggcgcgcattctcggccatcgtctcggcgagctgaggatggatcgctgccgcgggctggcgggagccctgggcgagttctggtggggtggggcgtgtcggggtcacgagcttactcttgccggtggtcgaggggaccagcctgtagctgctgcgaagtttaggggcagaatcgacgctcaagcgcggtacacaaaagataacgccggcttgcttacaggcagcttacatggaattaattttgttgctgattgtgtctgttgactgcttgggcagatgccgggttcaacgagccgtggcactgatttgcccgaaatctatttctctttatcagaaatcgagcgcgatgtgtggttgctccgtctcacccgaggggtgctgcgcatcgtcaggagtgttgcggtgagatggtgagatgcggtggacgccgattgcgcaactgacgagtgcgcatgcggcggacggtgaagtcgtgtgcttccgcagggacgacagcgatgtatgtggcgtacgcgacgctcaaggcgcgcgtgcagctttcgcgaaactcagggtccgatcggcaggatgcagcgaagccttgacttcttagctaccgctgccgccggtcgtgccgcgcaccacgcgcttgaccttgtcggtggtgtaggtctggccgccgatcgagagcagcggcggggaggcggtgagatcgacggagtcgaccatcccctgaatctcggtcgagatggccaggtcgttgcccttggaatccttgccggtcgcggtcagcgtgtaggtgccggccggccattgcgtgccgtcattgcccttgccgtcccagacgaagctggcgttgccctgcttcaggttgaaattgccggaataggcggtctggccggtcgcgctcgtgatcgtgatggtggcgctggtggcttgcggcgacaccagattccaggtcgctgatttgttgaactgcgtcttgctgccgtcgaccgccaccgtgttgccgacatagaccagcgcctgggtcgactgcgcgctcttctcgatcgcgatcagctgcttgagctgatcgttggacttcaactgctgctcgacaccggcgaactgcacgagctgctgggtgaactggttggtgtcgagcggatcgagcgggttctggtgctgcaactgtgtggtcagcagcgtcaggaaggtctggaagttgtcggcgataccctgcgacgaggtcgtcatgccggtgccggtgccgctgcttccggagctcgcgccactgttgttggcctttccggagacgaccggtgtcggcatggttgcatcgactgccatggtgaactccttacactctgatatcgacgccgccgagggcgccggttgcgcggccgtaggaacggccggccgctgcggcggggacgctgtcctcctcggcgacgatcaaacgatgggcgttcggattggactggccgttgttgttctggcccgactgcgactggtcgcgcaggctgaactgcaatccaccattgccggtcgacaggccggcattgtcgagcgcgcgctgcagctggttggcgtcctggcgcagcatcgacagcgtttccgggcgctcgacggtgagatgcgaggtcacctggccattgcggtcgacatcgatgcggacatcgatgcggccgagctcggcggggtcgagccggatctcgaagcggctcttgccgctcttggcggaggcggcgatctgcatcgcaagcccgctgagcggcaccgtggcgttttgcgcggcgttggtgacggtcaattgcgcggtcgccgacggcgtcgtctgggtggcgagttgtggctggagtgtgttcgccgcctgcgcgccgggatcgggcgtcgtgggctgggcctgcgcggtggcctggccgccggccgccggcgcggccttgccgtcgccgcccgcgtcggccttgatggcgtcggctgcgccgtccgcgtcggccttcgccttgccggcaaccgcagccggctgcgtgacggcgggaacgatgttggtcggcgctgcctgcgccgtgccgttgccgccctgggctgcggcgtcctggccggcaggtgccgtcgcgaccgcgtccttcgtggtcagctgcaccttggcttgcggtgtcgtcttggtcgcaggcgtgcccgccgcgaccgtggcggcgagtgtcgcgtcgccggtcgcggtcgctgcgcccgcagccgttgccgcatcggcgatggcgacctgtccctcggtcttgacgccggccgccttggcgaccttgtcggcattcgccgcggtggtcgccgcggttgcggtgccggcaccggccggcgttccgacgccggcggtggtggtggtaccggtgatcgccgcgcttgccgcgatggccgcagccgcgatcgcgagaggtgcggccggctggctggatggcgcagccgccgtcgcggtcgggtcggtcgccgttgccgcggcaacgggaacggcaagcgcggcgccggcggttgccgtgttggatgcatccggctgcggcacggcttgcgtcgtagccttgtcgccggcgggttgcgtatcgctgctcgacttctgatcgtccgctttcgatttcgacttggtcttgcgcggtgcgtcgctgttgctgtcgaccttgttgtcgtcgcgcgaattgccggaatcccgtgacgttgggtccggagccttgctgttgtcacgcgagcgcgcgtcggtcgtcgaagacgaatcgtcagacctgcgtgcgggcgccggctgggagtcgtggcggctgttgtcgctcgtggacgcagtgttgctgtcgaccagcgcggcaaagccgtcattccccgcctgcgaggcgggatcgggccgcgccgaccgctgcgccgaaccctgaaaggaccggcctgccaatgcttccgacgtcacgctgaccactgccaaccctcgcaaatgagacttccagcgttttgtcagcaaggagcgggccaacggggtgacgccataaataccgagttatttcagatggttattggcagcgatggcgggctggaaccggttcccggcgagtctcctttttgcctggcggcaagatttgccgtccgcacgcggccagctacggttttcgccggattgcctccccggagtacggcctatattaagagtggcctccgacgcgtcccgaaccaaccgacccggccttggatgtgctctaaggctttctggacaaaaggctttttccaatttcgtcacggagcgcatcagctcgccgcgacggtgaccaatgaccgcttagagatgctcaacagtctggatcttgaaggccgccctgaagacacacggatcgtcgttgcgatgtccggtggcgtcgactcgtcggtgacggctgcgctgttgaagtcgcagggttacgacgtggttgggatcacgctgcagctctacgaccatggcgccgcgacccatcgcaagggcgcctgctgcgccggccgcgacatccatgatgcgcgcaatgttgccgagcggatcggcatcccgcattacgtgctcgactatgaaagccgcttcaagcaatcggtgatcgacaatttcgccgacagctacgcgctcggcgagacgccggtgccgtgcatcgagtgcaaccgctcggtcaagttccgcgatctcctcgcgaccgcgcgcgagctcggcgcgcaggcgctcgccaccgggcactatgtcgcctcgcgccggcttgccgacggggcgcgctcgctggtctgtgcggcggatgccgaccgcgaccagagctatttcctgttcgccaccacgcgcgagcagctcaacttcctgcgctttccgctcggcgacatgaccaaaccgcagacccgcgagctggcgcggcgcttcgagctcgaggtcgccgacaagcaggacagccaggacatctgcttcgtgccgaccggccgctacaccgacatcatcggacggctgaagccgaatgcgattgcaccgggcgacatcgtcgacctcgccggcaacgtcgtcggccagcaccagggcatcgttcatttcaccgtcggccagcgcaagggcctcggcatcgcctccggccacccgctctatgtggtcaagctcgacgcggcgacgcgtcgtgtggtggtcgggccgcgtgaggcgttgcggatggatcgcatcgcactgcgcgacgtcaactggatcggcgacggcgcgctggatcgcgtgatcggcgagggcatcgagatctatgtccgcgtgcgttcgacgcgcgcgccgcagccggcatggctgcgcgccaccgatggcggctacgaggtcgagctcgtcgcgggcgaggagggtgtctcgcccggccaggcctgcgtgttctacgatgcgccgtccggtcaggcgcgggtgctgggcggcggcttcatcagaagcgcgagcgcgagccgcgcggtgcgggccgcgacgcaggaaacgatggcgcagctcgcggaagcagttcgcggatagagaaatacgaggcgtcggggcagggaatggctggggatatcgaccgcgaaggggtcgaaaaggcgtatggccgctgggcaccgatctacgatctcgtgttcggcaaggtgttcgatcagggccgtcagtcgaccatcgcggaagccgaccggatcggcggacgcgtgctcgacgtcggcgtcggcaccggattgtcgctgtcggaatatgcgcgcaccacgaaactgtgcggtgtcgatatttccgaaccgatgctgcggcgggcgctcaagcgcgtgcgcgcgctgggcctcagcaacgtcgagacgctggcggtgatggacgccaagaacctggcgttcccggattcgttcttcgacgcggtggtcgcgcaatacgtcatcaccgccgtgcccgatcccgaggcgacgctcgacgatttcgttcgcgtgctgaagccgggcggagagctgatcctagtcaaccacatcggcgccgagagcggggcgcgccgcgtcttcgagctcgccttcgcaccgctggcgcggcggctcggctggcgtccggagttcccgtgggcgcggctgaccaactgggcggcaaggcatggcggcgttagcctcgccgaacgcaggccgatgccgccgatggggcatttttcgctgatccgcttccgcaaatcgtgaggcttgcgcaatcttgaccgggaacatcggcgcgccgttccggttctctcatcatgaggatcaactggacacgcggcagtcggacacttgcattgtcttttgctttgtcctgtgcgttgacgttggcgcccttcgtcgccacggcgcaggcgccgcccgcacttgccacaccgccggcgcataccgcgccagaggcgtcggcacgcatcgcccagaatcggaactgcgcgcccccgcagccgtcgcatcccgatgcggcggttccggagggaaccaccaccgggcaggtggcctcctcgctgggcgataaactcgccagatccgacggcgtgctgtgcccgccggccggtgtcgatcccgaaatgcgcgcgccgaccctgccaagcggcaatacgccggtgattccaccgcccggcagccccggtggcgacccatcggtcaggccgaaatagcctctggctgcaatagtttgcagccccgcccgcgtttgcttgacaggtacgcgtgccactctttatatgccgcgcgttcgcaagcagcggctccacgccgccgatcgcgagcccatggcggggtagctcagctggttagagcacgggaatcataatcctggggtcgggggttcaagtccctctcccgctaccatgtttttcaagcacttaccctgtctcccatacccatcccggaaggctggacagcggaagttctggacgttcaattgacgggcagccagcaacgaatgttgccggagttcgtgttggcattggtcatttgttgcctccctttacgctcctttcgtgggacggtgttgcagatcgatgagccggcggctgacgccgccggctgtaatcgtacctattgggccttgatggcgatgcgcttgacgcccgctctcgggttctccgctttcggaagcaagatcgtcaggacgccgttcctgaacgaggcctccgctttatcctcttcgacgtcttccagcgcgatctgccgctcgaaggcaccgtaggtgcgctcggtgaagtgcttgccttcgctgctgcgctcgtcctttttctcgccgcgaatggtcagaatgccattcgcgatttcgatctgcacgtccttctccgtcatgccgggaagttcggccgagatcatcaccgccttgtcggtgtcgctgacctcgagcttcggccagccgaaccgcccttccatcaaggggaccaggcttggcgtgccgaagccgcggaatgcgtcgtcgaacagacggttcatctcgcggtgaagcgtgatgaatgggtcgtaattgccgcgcgaaggcgcgagctcctgatttctcgaccagggaacgagatcacggattgccatgtttttctccttcatgcgtgggacgaggagcgcgtcttgtgcgtcggcgcgccgcgtcctgtgatcatcaacctcgatcgagcggtcaggctgcctgtttctgctcgatctgcgagggggaagatgcgccgctcgcgatttcgatccggcgcggcttcatggcctccgggacctcgcggaccaagtcgatgatcaagagcccatccttgaaagaggcctgcttgacctggacatgctctgccaggttgaacacgcgccggaacggacgcgccgcaatgccctggtacagatattcgccgggggtcttctcgggcttcctgccctcgatggtgagcgcgttctgctcggctgtgacgttgatgtcgtcggcgccaaagcctgcgaccgccagcgagatccggtagtgattttcgccggaacgctcgatgttgtagggcgggtagttgtcctcgctcgtgtggcgcagcgcgccgtcgacgagaccggccaggtgatcgaagccgatggtggagcgccacaggggcgcgaagtcgaaggtggtcctcataccaagtcctccaaagagcaagatggttacgaaggaacgctagacgacaggtccgaaaaccggacgcccggcgcccgcaccggacccatgacggcgtccgatacaccgctctcgcggcagaaaacgagttagaaaaacgacaagccgattcaagagggacagcgaaaatttttcgacgccctagatgccgcgccgcatcatggagctcgcgcaacgcagggacgttaagggttgcttgcaaggcaggcggccgccgcttgacagcgggagcgccctgaatattttttctccaccgggaattcattcccgtttctcgaagcagaaaaggacaacaacgaccgtctggagcggcgacaatgttcaatgaagatattgcccgtatccgcgcccgccgcggtaacactcgcaggtatggacatctgctgaagaccaggctttcggacctcgcgcgtcagtatatcgaaggtcgattgtcagaggagcgggccgcctcgcggcactggtccgaagcgttccccgtctcgtttaccatgccgaaacatctcggcgcaccctcgagcgcggaggcgtcgttatgaccaacttcccctctcgaaccggagacgaccgcttcgcggcattcgacatcgtgctgaagagacgcggccgcggcaggtggaaatggtccgtctgtgcggccggaggagagaccgtcctatgcgggtcggaatccagtcgcccgtccgcgcggtacaaggcacaaagtgcgctctttctcctgctgtgcgccagtgcctcgcgtattcccgcgttgcggccggcgacagcatcggagatctccggcgcgagcgctcgcaggccgcagagccggatcacgatcgaaggactacgccagcagagaaagtcctcggaaaatatcgtaaggccccgctcggcccatgcggccaccgctgcatccaaggcgatggctcggcgccttgtgcgtcgtccccctcgctcatccggaggcatgggcgcatccgagctctaggaattgccggattgatggcaggatcctctggacgaatccatgaagcttgcccgggtcggcgcccaacttcacgcgtcggtcctcaggcacgccttgcacttgtgcggaaagcttcctgagcttctcaagccgggcaagccgacccccggactacatggaatgacggtcgtttacagtttgcacgaacctgcggcagcggtgaggcgtcgcgaagcgtcgaaggtcgccatcgatagtagtttagcagtcgaccaaatggaccgccgaaattttttgaccgacctcttgaagccccctgccacaaacctaattcctttcccgccgggggccggttccggccccggtctatgacatcgctatacccaatcaaggaggatgtgcatgcatttccgtccattgcacgaccgcgtgctcgtgcgccgcatcgacgccgaggaaaagaccgccggcggcatcatcattcccgacacagcaaaggagaagccgcaagaaggcgaggtcatcgccgcgggtcccggcgggcgaaacgagcaaggccagttggtcccgctcgacgtcaaggccggagatcgagtcctgttcggcaagtggtcaggcaccgaggtgaagatcgatggccaggatctgctgatcgtgaaggagagtgatcttctcggcgtcgtcgaacaccacgacaagctgaagaaggcggcctaagggcgcaaaagaggctgacagtcatcgaatagaaaggagatcaggatcatggctgccaaggaagtcaaattttcaaccgaggcccgcgagcgcatgctgcggggcgtggacacgctggcaaatgcggtgaaagtcacgctcggtccgaaggggcgcaacgtggtgatcgagaagtcatttggcgcgccgcgcattaccaaggatggcgttactgtcgccaaggagatcgagctcgaagacaagttcgagaacatgggcgcccagatggtgcgcgaggttgcttcgaagaccaacgacctcgccggtgatggcacgaccacggcgactgttctggcgcaggccatcgtcaaggaaggcgcgaaatcggttgcggccgggatgaacccgatggatctcaagcgaggcatcgatctcgcggtcgacgccatcgtcaacgacctcaagacccacgcgaagaaagtcacgtctaatgacgagatcgcccaggtcggcactatctccgccaatggtgacagcgagatcggtcgtttcctggccgatgcgatgcagaaggtgggcaatgaaggcgtgattacggtcgaggaggcaaagcacctcaataccgagctcgaggtggtcgagggcatgcagttcgaccgcggttatgtctcgccctattttgttaccaacaccgagaaaatgcgtgtcgagctcgaagatccctacgtcctgatccacgagaagaaattgtccgggctgcagtcgatgctgccgctgctcgaaggggtggtccaatccggcaagccgctcctcatcgtggccgaggacgttgaaggcgaagcccttgcgacgcttgtcgtcaaccgcctgcgtggcggacttaaggtcgcggccgtgaaggcgcccggcttcggcgatcgtcgcaaagcgatgcttgaggatatcgcaatcctcaccggcggcaccgcaatctccgaggaccttggcatcaagctcgagaacgtaaagctcaacatgctcggccgcgcgaagaaggttgtgatcgacaaggagaacacgaccatcgtcaacggtgccggcgccaagaaggacatcgaggcgcgagtcgcgcagatcaaggcccagatcgaggataccacttccgactacgatcgcgagaagctgcaggagcggctcgcgaagctggcgggcggtgtggcggtcatccgcgtcggcggcgcaaccgaagtcgaggtcaaggagcgcaaggatcgtgtcgacgatgcccttcacgcgacacgtgctgctgttgaggaaggcatccttcccggtggcggcgtggcattgctgcgtgcgctcaaggcgctcgatggtgtcaaaacggcgaatcccgaccagaaggcgggcgtcgacatcgttcgccgcgccatccaggtcccggccaggcagatcatccagaatgcgggtgaggacggctcgctcgtcgtcggcaagctcctcgaaagcagcagctatagctggggcttcaatgcggcgaccggcgaatatcaggacctggtgaaagccggcgtgatcgatccggccaaggtcgtgcgaaccgccctgcaggatgcggcttcggtggcctcgctgttgatcactaccgaagcgctggtggccgacaggcccaagaaagctgagcttgcttcaacggccgcgccaccaatggacttctgacagatgccgcgcccggccgcttgcgtggcggccgggcgcgatttttgccggtcaaggagaccgcagacagataggagcgcatacagacgccgccgctcgcacgcggtctcaagcttcgtaaccatcgcatgggtcaatattaacgacaggaggatgagatgatcatggatcacaccattggctccgctcgtgcggagaagcgcaagaactccacacagcgcctatggcgccgtcttctgacggcgtcgctggcatcggcgctggcgatgccatctctggctgcttgggggttgaatagtccgcccagaacgaccgcaatacccgctgacgttcggccatcgccgccgattgcgcacctcgagtcgatgcgctggatgcagtggaaagcggaagctccaaggctgaggatcgacatactgatgtcgcccaacgtgacgccgtggggcatcctgcaacctggtcaggatcggacccaacgctgtccgacgcttagctgaccgttgctcgagtgggaagtagcgcagggactttgcaggcaaagaccctgtgctattaacctgtggtgatgccgacagtagtcgcgtgcctcttgaagcaggccaaagagcttcggcgatacgcctcgcgatttatggcttcgcgcgatcgcgtctgcgcgcatgatcgcctccaaccccttcgcttggtcatgccggtctctgcggcacgccggaggtggcttgcgacgaggcggtatgtttcttctcggtcgccatgatcgcgccggctcccagcgcaagcgagcacctctgaagcgtcgagaagggaagttttcagctctcagcaaggcatcgatcggatgtcaggaaggggcggcatccatgcggcctatacatcgcagcagatctggcgcggcaaggtttctggagcgtccaacggaatcatcatgaggggccggcgaggaccgcaagtttttttctgagtggctcttgacgcgatcaatctgctgcctaatttttgccgcgccaccccaacttaacggggcggtgtttgggtgccaatccggacccagaccagacgggcaccggtcgtgtcccggtgccgttcatatccatcttgctccctggaggatttggctatgcgcacatacgacttctctcctctcttccggtcaaccatcggcttcgaccgtcttttcgatctcgccgagatggccaatcggtcgggcgaggaggacaactatcccccctacaacatcgaacggctggcggaagaccgctatcagattgcactcgcagtcgcaggcttctcgtccgacgagatttcggtgacggccgagcagaacgtacttaccgtcgaaggaaacaaggtcgaaaagcccgagcgcgaatacctctaccgtggcatctctacccggaggttcaagcggcagttcagcctggccgattacgtccaggtcaaaggcgccgcattcgacaacgggctcctcaagattgagcttgcgcgcgaaatccccgaggcgatgaggccgcggcggattgcgatcaacgcggcgcagacggggccgctgcgacagctcgaatctgcggcctgacccggcccgagctgcgtgccggaaatcggcacgcagccttcacatcgatatcgtctacagaacggaggcagccatgcggccgacgaccgcgcttacctgtctgaatgatctgaagccatcattccagaacccacgaaagttcgagtatccgctgcgtggtaagcacctcgcatgcgctcgacaaatgcgtcgccttgcagcctaggagcctgccatgaccgatatcaggctgccaaagcaagtcgtggacaggattgaagcccggtggtcgtcaaggtattgctcgaaggagacgcaacattccggattgatcgaccggcgccttgaacaactgcgagcgcaccgaaacaacatccgccgctatcgctggcttatgggtacgcagctctccgacttggagcgtcagttcatcgagcggcgtctcgccgaggagcttgatgccatgcaacgtgaggcatctagcgtcccgcctctcggcgcacgcccgacgtcgatcccggccgccggaacatcgggagaaaaccacccatgatcgaccttcgggcaatactcattcgcggtagcgagaagatcatcggtcattaccagtatctccttgataccgcgacctcggaactggagcgcgagcgttttcgtcaacgcatccacgaagagcagcaactgctggacaagcttcgccagcctgagctgcgcgcccgcgcggcgtgatgtgccacctccggcgggtctgtcactggcaggccagcgtgtgcgcgccaggacgcgacgtctcgccgacccgagtggaggcgtcgggtagctgcgatgggcagacttggactggcgcaactattatcgccctgccgccgcctgtcggaacgcaggatcttcgaccggctccacaacgaacatcatgaccacgagggcgataaaggacgaggcggccaggaaaaggaagacagaatcccagctatatgcgtcgaggatcacaccggtcaggaacgggaacaaggcgccgccagcctggccaccggtgtttacgacggagaccgcgagcggataagcctccttggtggtcaaccctgccggatagaccgtgaacgatgaatatcccaaatttagaagtagccccgccacgagaagtgctcctccgagaaggagcggatcgctcggcgcatgaatgagggcgtacatcatgaatacgctggacagagccgtgatgacgatggtgggtttgcggcgcttgtcgaacacgcggtcggagagcagaccgccaagtaggtttccgagcaccccacccacgaaaggagccgctgccacgaagcctacgttcagaatcgagaatttcttctcggtcgtcagataggtcggaagccaagcgaggatgacattgatgatgcccgtcatcatcaaatatccgatggccagtccccagatattgggggagcggaaagtctccgagactgtggcgattggtcggactgtcctggcacgaataagcctgtccatcccaccgaagttacgcctcctgttcccagccaccaagggaatcccgccggccgcatccgaaggggcgggcggcgagtcgcattggatgtgctcaacttccgtgctcgacgtaaagggactttgcgccggatcgttggtgacgagaaagtaccaaagtacagagaagatgactccgggaacagcgcaaatatagaagatatattgccagcccaaggaggcgatcacgatggcaccgatcggaggcaccaggaccggtccgaactttgcagccgcaaggaagatgccgaccgctgttcctttttcttttggcggaaaccagtggttcatggtcgagagcatcgcgacaggcagcggagcctcagccagcccgagcgccagccggttgaatttcatttgcagagccgacgtcgccgtgcccagtagtcccgtaaagaccgacgtcaaaatcatgaagagcgggaagatcatccgcacgccaaaacgcttcaccacgaacccggccggaatctgggcgacggaatagccgatgaagaagagactgacgatcgcaccggcctcggtgttcgtcatgttgaattcgctcttcacgaacggcagcacgatgccgatgttcgcgcggtctgcggcggccatcgtgtaaacgaagaagatcagggtcatcacgacccatcgatagttcgattttgcagaagccttgttctcggcgtttgcccccagcacttgcgacatcgtcggaccttccttttgtcgaccttcatccctgtcatcgcgatcttcagggacatgcgatcccgtcgccggcgagcggctcagaacccgtagagggccgttgcattgtccacgagggccttgcgaagccggacgtcattgcccaggcatgataccaggaactcggcgaggggcccgggagccggcggattgtcggcttcggtcacgtgcggccaatcagagccccatagaacgcgatcttcgttggtgtcggcgaaaagctgcgcgatcgcgacggcatcgtcgtagtacggtgctccggatctcgtgttgaggtaaggagccgagagcttgatccaggtccgtccgccctcgagaaggcgcagcaacgtatcaaggcctgtgcgggctggatcgccgggctcaacccgtccgcaatggtcgatgaccagtggcaccggcaaatcgctgagcatcgcctcgtgccgcgcgagttcgctcgccttcatgtgcaactggaggtgccatccgaggtctgcgatcgaccgtgcgacgttcggcatcatatccatggtggtgctgccgacctggacttgattgaaccgagcgccccgcgcaccttgcacatgcagttcgaaaatttgatcatgcgcgagacgatcgttgattaccaccactgcgcggtaaccggagcctagcgcagcggcggcgcccagcgtgtgccggttgtccgtaccgtagagagacggctgcaccacgacgccgcgcgttgtgcctctctcggccgcaaatacgcgatactggtctacggatgcggtcatgttgctgacgactgcattcggcacggtgggaaaggctgcgtccataatgtggaagtggcaatcggccgcgccggcaaaacttgccatgatacgagcgttcggactttccttcattgaggcctcagcgcccgaacacgtgcagcagcgcgagcgagaagatcgggaacgccgctacggacaggatgcccagaaggagggcgaggatgtagggggcgattgccttcgaggcgtcctccacgctcgtacccatgacagaacaggccacgtaaaagccaatcccaagcggcggcatgaagatgccgacacccatcgagagcaggagcaccatcgcgtaatggacaccgtcgatgccgagctgggtcgccatcgggtacaggatagggccgagaatgatgagcgcgggcagcccttcgaggagggagcctacgaccaccaggatgacgatggagccggcgaagaagagatagcggttgtcgccgaccgcatggagcatcgaggccaggtattgcgggagatttcccgctgccatgatccacgcaaatgagccggccgctgcaatgatgaagaggaccattccggacatcaccgcgcactcggtcgcgacggtcacgaaggtccgccagccgatggagcggtaaaccagcatgcagagtagaatgccgtacaggacggctacggacgaaacttcggtaggtgtcgccacgccgaatttgatgccaaggacgagaatggctggcatcatcaacgggagcacggctccgcgggccgattggccgatctccttgcgcgtggcttgtcgaacactcgccgtcggattgcgcaccgacatgacatacacaagtatcatcaggatcgcggccaggaccgcggccggaaggagcccggcgatgaacatcgcgccaatcgagaccggcacgacagatccgaggacaagcatggcgatgctggggggaatcgtctccgacatcgcggcggaggctgatagcaccgccgctccatccctcaggcggtaacctttgcgttcgagctcctctcgcatgaccgaaccgaccgcgaccacgtctgcgatctttgatccggagactcccgaaacgagataggtcgtcattacgacaacctgcagcaggccgccgcggaaatggccgaccagggccattgcgagcgccacgagccgccggctaatgccgcctttttccatgaccattccggcccagatgaagaacggcagtgtgaggaggatgaaatggcccgagccatcgatggtgttctgggcaatagcgacaatgggggcgagatcggtcgcgagcaagaacaggatcgatccggcgagcatcgagaacgagactggcaagccgaagaggatcgccccgaagaaaaagagcagcatcagcacgaggccggatccggtccccagttgcatcccgggcacaacgcggatggtagacacgagcgctccgacgacgccaagaatgaggcagccgtggaggatcgggagcaccctgtggactttcaggaggcgttcgacagcgaaaaggcttacgaggaccatccccgcaatgaacggcacgaccgtgagaccgaggttccactgcaacattggcatgatcgactgcgcatcgatctcaagcaggtcgatggcagcgaggaacgagaccaccgcaacgacgagaatggtgacgtcgatggttgccaggactgcgcgccgggcggcgagtggtagcatgtcagtcacgagcgctacggccgtgtggtggcggccgcgataggccagggcgccgccgacgaacgcaatggtcagaagggcgaggcgcgagacctcctcggcccacaggaacgagtgaccgctcagccctctttgggcgacctccaccaagatgagcccgagttcgccgaccaatacgaagaacagccccacgcgcgccgctgtgtcgatcgcggacatcatttgaccgtacacgcgcacgaacgcgccgcgctctggcggagaatcgaccggcggcttcaacccgagatgaacctcgtcggccaactcaatgccgctcgcttccgacatgaactgcccctcaaccggcctggctcaggacggcgtccatcagttccgctccgatagtcggccggaactggtcgtaaacgggctgcagggccgtgcggtaggctgtgcgatcggcgccttggatcttgatcccctgcttgacaaaccgcgcctcggtctcctcgctggctcttgcgatggtggcgcgcgcatccgctctcaggtcgtgcgccgcctcgcgtatggcctgctggtacttcgtggcaaggccgtcgagcttgcgcttgctcgccatcatcacgcccgggttgtagacgtggtcagtcttcgtgatgactttgatgacctcatcgtgcttcgatgcagccattgagatcatgggcgtttcgatggcttcgatggcaccttgggagagcgcaaggtacacctcagagaggtcaacctggacggggttggcgccgagcctattgaacatcgcggcatagatcgcgccgggctgaacgcggattttcattcctttcgcctcggcaggcgtcgccagagagcgacctgtcgtcgatgtcacgcgccagccgaaatgtgcatatgaaaggccatagatgccctttgcaggcagttcctccagcaacttgggaccgatctccccgtcaagcattcgctcagctgacgccgcgtccttgaacaggaacgggaggtcgacgaccatgaacttcgggtagagcgtctggatgaagcccgacgtgtgacagcagaggtcgacaatgccggtctgcatgccggtcaacatgttgacctgcgaccccagttgtccggtcgtatagacttgaatctcgacgcccccatccgtcttttccttgaccttgtcggcgaagcgcagcgcaactcccatgaacgggtgcgacggcgtgtcgggatagaccatcttcaatgtgtgctgtgccgcgctcgcgaaattcgaacggacgataagcggcgcggacaacccggctgcgagcaaatggcgtctcgatagcgtcatgatgtatctctccctggacttgaactcttgtttttttggacgggccggccctgctggccggcgttcaatgtggcggcagcctcgcaagcatggcgtcaattgccaccttgtggtcggcgggctcgacgccctgaaaatgctccttgagccccaatccctgcttccaacgaaggcgggcgacgatagcgcgcgccataacgggttcgataccagcgtccgcgatcgcttccgccgacatctccagttcctcagcgcggcgtttcgcgtggatcacgcccgacgggaccagactctcgacggtgtccatccaagggcgcgctaacgtcttgcaggccgaagcgagcaccacctcatccacaccgtaatggcgggcagccagcatcatctcgtcggtcagcgcctcgatccccttgagcaagacggagcgcaggatcttgatccccgacgcccgcccaagttcgcgacctacgaacgtgatgttcatgccccagggattaagcagatcccggacgcgctcgccggccggcccgctcgacaggataggcattgcgtagccgttcttgggcgtcccctcgatggacgcatccgcaagcagcgctccacttgatgctagagtatctgcgaccgataccttgatcttcggcgtcgccgaagcgaagtcgacgaaggtatgttgcgcgcctaggcagcccacgaaggccgcagcactttcaagcgaagccgatccgggcgtcacgctgatgatgaggtccgccgactcgctgagttcacgattcgagcggacgagcgtaacgccggcttcggcggcgcggcgctggatcagggaggcaaacgggccatcgaacgcatacttgtcgtaggcatgaacgacttgaagcccggcattacgcagacccgccccgagcgtgctgccgatctcaccatatcccacgaggccaagcctgacttgaaccttgcccaacagatcatcctcctcgatctaaaatcttctgaggcgctacttcgcgtacgctcccttgtacgtgccatcgcggacgctcttcagaatcgcatcttccttggcctcctgctctttgacggagcggatgaggtcctcggcgattgagggcgggaatgcgacgacgccgtcttcgtcaccgacgacgatgtcgccgggttgcacgaccatgccaccgatcgagaccgctacattcgtctggccgggcccattcttgtagggaccacgatgaatcgcggcgcgcgcaaaaacggggaaatccgaacgcccgagcgccccagcgtcacggatcgcgccatcgaccacgatgcccgctgcaccacgacgtgccgcgatttcggcaataatctcgccgaccagagcgcggcttgtgtcgcccccgccgtcgatcacgaggacgtccccctggcgaaacaattcgagggcctgatgaatggcgcgattgtcgccggcggcagttctgatcgtgaaagcaaggccgaccatggatccgcctcggtgaaaggggcgcaacccagttgcgcccggcatgcgctcaagattgtcgctgataaccgcggtcgccacgtccttgaatatcagcgccggaagcccgctcacattcttaagttcggtcatgccgtcctccccatcctgttttgttgcttaaaaacaaaaaaaatacaaaatgtcaattattctcacgacactcagccaataagattgaaaatagtacactatttgtacaattgcgagcaatccccattgccttgcgaattcccttgggactaagctgcgagttctcgtttagggggaggcaatggcgggtggacaggaccgggcttacagcgttctacgattgagggttgtcggcgggcattatccgcccggtttccaccttcgggaagaaccgctggcgagagagctgggtcttagccgcacgccggtgcgggcagccctgagaaggctggttgaggacggactcgcgacgacggacgccggccaaggcattcacgtaacggaatggagcgaggccgacattgaggagacgttccgcctccgcatcttgctcgaagcgcatgccaccgaacgcgcagtggcgcgaggtgacgaggagcttgccaagcgcctggaggcaagcaaccagatcatggcatctgccatcgcaaaaggcgacgacgagtcgatctcggtcattcaagcgaccaacagggagtttcatcgcaccctactcgagttcgccggctcgcctcggctccgtgcgatcctcgagccaatgatcgacatgccgatcgtggtgcggtcgttttttctgtactcaccggcagaactcgctcagagccttcaccatcacgaggacatcacgatcgcagcacgcctgcgcgatggacagctcgggcgacgcgcgatgcagctccatcttacgatgtcatacgcccgtgtccttcagcaccgcgagaattggcgcgagaaacggccaatcgccccctccgatactcagtaaggagcgagcggctctgtcacggcgtacttgccgtcggttgtgcgttttttggtttcttagctgcgcttcaccgctcatagccggtaggatctgaactgtccgacgggctcgcgaacgccttacgcagaactgtccaaggaaatcggggttacgacaacttctaaccgcgcgaaggccgaatcgtggttggcccgcggccttatcttgctccagaacgcggagtggtggcgcgcggcacatccgcacaccgtcggcgacgatgatgtattggggcaaccacgccaagacgcgcgaggccttccagggcggcttgaccaagagcggcaacaagtgcgttcgcaatgccggtggaacgtatacctatgcgggccgcagcgatgacatgctcccatgccaaacttgctcagagcgcctttcaaagcaacagtcttcgcaagcaagccaattcaactgcacggaccggacaatcgataccaacgtcagtatgcgttgttgctcgacgtgctgcggatggacgtctcggaggacctgctcccctagatgacgaagggggaacgatgtctctttcttgcgtttggcaacgtcaggtgagcccgtacttcgtcatcttggtatgcagcagctggcggtgtatcccgagctttcgggcggcctctgttcgattgccgccgctttgggcgagggcagtggtgatcattttgcgctcgagttgctcgagcgctgccggcaggtcctccgcgacgatgccttgcgtttccgcgccggccgacgacgagaggaagtccaaatcgtcgacgtccagcgtcgtgctgcggctaaagatggcggcgcgttccatggcattgcgcagttcgcggacgttgcctggccagtcgtgagagctgagtcgtttggcggcttcggcggagagttcggtcgatcgattgcccgccgcattcaggaagtgtcgagcgagtggaatgatatcttcgcttcgatcccgcaaaggctgcagcgcgatcggcacgacgttgaggcggtagaagagatcctccctgaattttccttgcctcacccaagtcgcgagatcccgatgggtcgccgctatgatgcgaacgtcgagcggctgagaccgtccgccgacgggcgtcacgacgcgttcctggatggctcgcaggatttttgcctgcatcacgagatccatgtccccgatctcgtcgagaaagagcgtgcctccgtccgcatcccggaacgctcccttgcgctccgctacggcgcccgtgaatgcgcctttgacgtgtccgaacaactcgctttcgagcagatcggtcggaatggctgcgcaattgagagcgacgaaaggaccaaccgaccgcgccccggcgcgatgaatggtgcgcgccacgacttccttgcccgtgccggtctcgccggtgatcagcaccgtcgtgtcggtgtcggcgacaaggccgatggtcttctgaacgatgcgcatgcccgcgctcgagccgatgagatcatcgcccggcgtgtcttcgtcctccggccgcccggcctcgcggctcgcgacgcgcggcctcgtcatccggcgcagcagcgatgagagatcgtcccgtcccaccggttttgtgagatggtcgaatgccccgagcctcatcgcctcgatcgtgttggctgcgctggcgaaggccgtcattatcgcgactggcggccgcttgtcgcccatctcgcgataatgacgaagcacgtcgaggccgttcatatcgggcatacgaagatccagcagtacggcgtcgggcctgtgagcgtcggccgcgcggatcgcttctttcccgttcgaagccatgcttgtctcatatccgaggtcgcgcaccgtctcgcatatcgcgtcgcgcagcaccttgtcgtcgtcgacgatcagtacgcgggtcatgtcggcgctccgcatggcagatcgatcgtgaaggtcgtgccgtcgtctcgatgctccagcaggacttggccgccgtgagcctccgcgatttcccgcacgatagcgaggccgagaccagtgccttcggcgcgtccggtcgcaaagggctcgaagaggtgatctcgaacgtcgtccggaacgccaaagccgtggtcttcgacggcgatcgcaacgcgatcgtccgtcgccctcgcccggacagcgatggtcgtgccgtcggcggagttttggatcgcattgaggagcagattgtcaaccgcgcggccgatctgcgacgcatccaggaacaaagggcagggcagttcggcgggggcttcgagcgtgatcttcctcttgcccgcttgctcggcgaagagcgaaatgcgctgagaaaggaaatcccggattgcggacacttcctgtcgatcgactttcgaactctgaacggagcgcaacaggttctgcagcagctgctccatccgggcgacctgatcgaccacgacgctcagggcatttctcgcacgcgatgggtctccaggttccgcgagtgcgttctcggccttcaacctcatggccgtgatcgggttccgtatttcgtgcgccacgccggcggcgacccgtccgagcgcagcaaggcgctctgcggcggcgacctgcttctgaagacgctcggaacttcgacgtgcgtcggaggcggccgcaccggcaccgttgatcgcatggacgatccggtccaggtcgcgctgtccggtgaccgccagcaagggtagatcctgggacccggccgcgagagctttttcgatcgctcgcaagcgcagcgaccaccgccacaagacccggcccaggagtgcggcagagccgagaagcacgacgagcaatagcgagagaccggtcgcgacgagaaggaacggccgctccgctacgttgacgacgcgcatcatcgtccaagccgcgcgtccggacttgtcggcgaacgggcaaccctggatcaaaagtatctgcgacgtgccctcgcgcttccaggccacaggcctgttgctcgataccgtggtttcagcgacctggcggatcgtaggctcctccgcttgcgggaggtccgtcttgaccccgctgccttcgtagcttgggaacgcataagcgagggaaccggttccagcctgccacacgccgccttcgacgcctttgaaagcttccaacgcttgcgcgacgccgctgccttctcgggctaccggcaggcgtgcgctttcattcaaaatcgcgtcgcatgacaaaaccaacgtcgtctgcgcgcgctcgatgcgctggctcgtcgtctctttgtagagggcaacgagcatgatcccaacgatgatcgcagcgatcaaaaacaatccccagcagagggcgaaccaaccgactatcgagcgtggaaacaattcgccgaacctcgttccgaaaccgtcatccgagtatgcacggaacccacagcccgcgccatgccggcttattccatccgggcccgccgatcatggcattggcagccgctgcgtcgcgcgtgccatcggcgggcgtcgtgattgcggacgcggtgtcttcaaagccgacggccagcgaaccgcaacgctccaattaacgacgtgatttcaacgcctccggcgttggcacggcgcttgcgatgtcctgcacgacaacatcgatagcaaggagcgtcgtatgcactggatcgatcccgatcatctgccggaagtcggcggcaccgtcgagctattcctgatgaacaagcacggcgaagccgatggcttcctcatgacggacggtcgcgaagtccacgtgccgccgcacctgtcgctgcgcctgctgcgcgaggtctgcccaggcagcaaggtgcgcgtgcgtggcgtgcgtcctcgcgccgtcgacatgatcgcagccgtcgccatcgagacgcccaaaggccgcctgctggacgaggggccggatcagcggcccgacgacgaattcgaggaagccaagcacgggccgatgacggtgcagggcatcgtccgccagccgatccacggaccgaagggcgagacccgaggggccgttctcgaggacgggcgcatcatccgcttgccgccgcacgaagccgaacgcttctccgatctgttcgtcgccggtcgcaagatcgcggcgaaaggcgagggagcgaccacttccttcgggaccatggtcgaagccaagcagatcggtccttcctcggacgagctcaaagccgtcggaggtccgaagaagcacaagcacgggcccgatcacaagaagcccaagcatcacgaaaagcaccatcgtcctggccatcacggttgagtgccgacaatggcgcgcgtcccgaactcccgaccgctgcacttcgtgcagatcggcgatctgcacgtcaccgataatggcctgcagaaccatcgcgattttcttcggatcgtcgaagagctcaacggaaatgtcggtgacaaggtcgatttcgtctatctgccgggcgacaatgccgacgacggtaccgatgaacaattcgcgatcgtgcgcgacggcctcaagaggctccaactcccttggcgcgcgatccccggcgatcacgacttcaagccgagatccttgaccagcttctacgacggtctgtatgtcccgaagctgccccacgcgcaggaggtcaacggctgcgtctgtctattcctcgacgtggtctcgcaaggaaccggcggtcccgatttcaagctcggtggacagcagttcgactggctcaagctgaggctcggagctgccaaggaagaaggaaagacgtgtgtcgtgttcatgcacgcttatcccgcggatctcggggacgaagcggaagcactgacgcagcttctcgacgagagcagtacgctgctcgtcgccatgggtcatacccattacaacgaaatctcgcacgacggtcgcaccgtctatgcagcgacaaggtcgacggggcagatcgaagaaggccctgtcggcttcgcattcatggcggtcgacggcaacgccgtcagctggcgcttcaagccgctcgaatcttcgtggcctttcgtgatgatcacctcgccggccgatcggcggctatcgttcgaaggtgatgccgacggccgcccgaccgaagtgcgcgccacggcgtggggcgcggctccgacggcacacgcggatctgcgagtcgatgacggaccgtggcttcggatgtcgagcatcgagggaggccggttcagcgcacctttccgttcagacaaggcccatcgcctcgaggttcgggtgaccgaccagaacggctcgcaggacatcgacgcgatcgagtgggatccggacggaaaatgtggtcgcaagtcgagcggcagcgacacgaattcgatcggtgcgtggcccgagcgccatctgttcggaacgcaacttggtcccaatcgaaacgggcggaagtggtgatcgcccataattcattttgcggaattgacgacatgcagaacatcagtccggtctggctttatccgatcatcctcgtgtgcggcgcgctgcaggcttggggcccgccgatgaacaacgccttgcggaactcgatggagaacccctggctgtcgagcatcatctccttcctgccggtcgtcgcgttcctctccgtcgtgtgggtctgtcagcctcatccgttcccgacccgggaaagcatcgctgcgatgccgtggtgggccccgctcggagggctgatcggcgcgttcgcggtggtcgcgggcctcatcttcgtcggccaggtcggcgccggaacgttcggcggcctgaccatcacggcgaacatcctgatgtcgctgatcatcgacaagtacggattgttcgggatgacggtccgcgagctcagcttgggtcgcattgctggcgccatcctcatggtggccggtatcgctctcatctcgaagttctgaggggaggtccgcatgacgctcgcgcaatcccagcaacgagccctcgcacccctgctcgccttgaacttcttcatggcggacatgcaggcgggcatcggcccgttcctcggcgtcttcctcctcgcccacggctggcagagcggctggatcggcacggtgatgaccgcgggcggcgtcgccggcatgctgatgaccacgccagcgggagcgttgatcgactcgacgcgcagcaagcgcctgtacgtgatcattccaggcgtctgcaccgtcatcgcatccggtatcgtgctgctgtcgcaggaattctggctggtggcggcatcccaagtggcgaccgcgatcgccggcgctgcgatcgggcccgcggtggccggcatcacgctcggtatcgtgcgccaagccggcttcaaccgtcagaacggaaagaaccaggcctacaatcacgcgggcaacatggtcggcgcggcgttgtccgggctgctcggatggctctacgggttcacggccgtgttctggctcgccgcggcgttcggcgtgctctcgatattatccgtgctgatgatcccgggcgatgccatcgacgatgacgccgcgcgcggtctcgagcagaaggacagccagcaaggccatgtcagcgggctgcaggtcctcgtcgaatccaaaccgttgttgatcctttcggccgcgttgctgttcttccacctcggcaacgcggcgatgctgcccctctacgggctggcggtggtcgccgacaagcaggcggatccggcaagtttcgtcgcgatgacgatcgtgatcgcccagggcgtgatgatcctgacctcattggccgcgatgcggatggccgagaaggaaggctactggctggtgttgctggtctccttcgtcgctctcccgatccgaggcgtcatcgcggcctggctgctgaacaaatggggcgtctaccccgtgcagatcctcgacggcatcggagccggtctgcagagcgtcgccgttcccggattggtggctcggattctcgacggtaccggccgcgtcaacgtcggccaaggagcggtcatgaccgtccagggcatcggagcctcgatcagcccggccatcggcggctggatcgcgcaggtgatgggctacggactgatgttcctcattctgggctcgttcgcggcggtgtcggtcgggctctggctggcgttcgcttccttgctcaagccggcctgcgccggcagaccgagccgttccgcgcctgaatttgccgtcgcaggagcgggctgatgttcagcgcggccaccgcgacatggggcattgcaggcctcgccaccctcggcgtggtcgcgcggccgtggaatctgccggagttcatctgggccgcaatcggtgcggtgctgctcgtcgccttcgacctgctgccgtggcgcgaggctttgacggccgccggcaaaggcgtcgacgtctacttcttcctgatcggaatgatgctgctcgccgaggtcgcgcgcaaggaaggcttgttcgactggctcgcggtgcaggccgtgcggcaatcccgccggtcggcttcacggttgttcgcgatcgtatatgcggtcggcacggtggttacgatcttcctgtcgaacgacgccactgccgtggttctgacgccggcggtctacgcggcgacccgcgcggccaaggtggaaccgctgccttacctgttcgtctgcgctttcattgccaacgcggcgagcttcgttctgccgatctcgaacccggccaatctcgtcgttttcggcgagcggatgccgacgttgctcgaatggctgcgctacttcgcgctgccgtcggtgatcgcgatcgtggcgacgttcgtcctgctccgcttcagccagcgcgaaagccttcaaggtgacgtggagagcgaagagaagggcatcgcgttgacgcgtggcgccgcgatcgttgccttcggcatcggcgcgacggcagtcgcgctgctggctgcatcagcgctcggtcgcgatatcggtcttccgacattcgtttgcggcgcgatcgtcacggcgatcgttctggtgctcgggcggaagtctccgctgccggtccttcgggacgtcgcctggtcggtgctgccgctggtcgccggcctcttcattctcgtcgaagggctgaaccataccggcgtgcttccggctcttgccgacgtcttgaagcgggccgccgccgatgcgccgaaagccacggcatggggagccggcatcgtcaccgcgtttgcttcgaacctcatcaacaaccttcccatgggtctcattgcggcgaccacgtctcacgccgcccaagcgtcgcatgaaataacgggcgcgatcctgatcggcgtggacctcggtccgaacctctcggtgacaggttcgctcgcgacgatcctctggctgatcgccattcgtcgcgagggtgaggacgtcggcgccactcgcttcctgaagctcggcctcctggtgatgccgccgagccttcttctttcgcttctctcgctttcgctggtggcgcctcgatgacgcgccggcaaaacccgttctcgttcgtccgagcgagaaccagcaaccggagccgatcggccgatcggcgtgaatggaggaagacatgaccaatgaagcagatcgcgaccgccggaccgacctgtctcggcgcaccctcgctctggctaccggcgtcgcggcgctaggcgtcgcgctcggcatgcgctcgaccgcgttcgcgcaaggcaaggccgatgccaagggggaaggcaaggcggactcgaagatcgaaggcaaggcggacgcaaagggagaaggtaaaggcgagggcaaggccgaggccaagggcgaaggcaaaggagaaggcaaaggtgagggaaaaggcgaggggaagggtgaaggaaaaggcgaaggaaagatcgaaggcaagggtgaaggaaagggcgaaggcaagttcggcggcaaggaaggacgctgggatggcaaggccggccgcatcaaggtcgatgtcgcaagtgacggcgcgacagccatcgacgtgcggtgcgccgccgacgaacccatgcggacctgcgccgacatcacgcgcgacatcgtcgatcggatcagggcaccaaagtagttcgaggagcgcgacatggcttacggcgacctcgtcgggcgtgtcgatttcgatatgacccgcgcgtctcccttttcctacacctgtcacgcctgcaagcgctgctgcaggaacaaggcgatccgcgtcaatccatatgaggtcctgcggctggcgcggcgcttggggctctcgacgaccgagttcatcgaaagcaagacggaagccggcggcaccgtcttgcgctcagcggaagacggcaattgcgtcttcctgaacgatcgaggttgctccgtgcatccggaccgtccactcgcgtgccgcatctacccattagcccgctgggtgtcggccgagggcgaagagtcattcggaggacttgctccgcacccgcagacggagggcgtgtacggcaacgcaggcacggtccaggactacctcgaccagcagggcgccgaaccgtacttccgaaactcggaccgctacggcgtgctttacgacaagatgctcgccatcctggagaaggcggccccgggcgaactcgatcggcggcaggagcggcgcgaggagatcgatgaacttccgtcgggctcgatcggttccgccttcatggacatcgacgccatgctcggggcttgcatgcaagacggtccggacgagatcgtcgagcgccacatccgagcggtcgaaaattggctggactccatcgacggagaaatcctcgccaaggcgcctcaaagccccggacttcaagagggcgatcgccgcaggcggtcgatttttctcgatcgcaaaggcacatgaaatttggagcgcacgatggagcttgctcatcgtgcgctggttgtcgtccaggcggccggctgcttagcgaaatccttcgcgccatccccgaacttcgcgggctgtgctgtccgagcgtgtccagaagtttgccctggccggcgtcgctgcacgtttgaatggtccaagacaaacatcgcgacgattatgggggcggagcgggtagtcttgagatggtacatgcggggagcgcggcactggcaggtttcggcccatggcgcgttgttcctaggagcaaggctggttaccgaaagcagttggtgctagatgaactcgctgctttggctcattgacgtggctgcttgatgagttgattccactctaaatgatcggctctcgttcgatagcagttctgacgactggctggtcgacgtagcaggcgagttgctcagaagcctgttgtacattggcgaactcgcggagttcacggaacacgaggagtcaggcggctatggacacttggcgtggggctcacgtacggcgcttgcgcagcttgctcagaataaagcaagatcatctcgccacactgatgaatgttacgcagactacagtatctcgatgggagagcggcgcgatccggatgtctgaaaggcaatatgaagttgccttaagtgtactaggagcgcggtcccctggcgcggaccgcgcaattcggcggctcgtcgaggggtcgtcgttgagcatccatctcatttgtgactggacacacaggctcttagccgcctcgccatcgcggtacggcgagtggcgtctctctcctggggatgtcataggtcgatctctgctccgatatgcgtctacggagattctttcagctgacgaaggactgcgcgagaaagggtggtatgacgctccgtctagcgcggtgtctatcgagaccggctcgaactttaggctggacgtgccgattccgcccagcacggtgctctgggaacggctttggcttgccgacggcagtgcggtccgcctggtttcgacaattcagcacgagcacgtccgcgcataatttatgcgctatgttcactcgcgacaacgatacaatggatgttgaggtgtgtatgactgccgagccgtggcttctaccggaagctgcggacctttaaagcgggcgatgtaagcgatggcggttctagtaacgggaagcgcggggcatcttggtgaagctttaatgcgcattttgcgggaatcaggtcggcccgccattggcgtcgatatgaagccgtcaccttataccgacgatgtgggatcgttaaccgacagggatttcttgcacgctctcttccgcagaggagttcggtgggtcatccatgctgcggcattgcacaagccgcatatcgtgacgcattcttatcaggatttcgtggacaccaatgtgaccggaacgctcaatttgctcgaaggtgcgagcgagacgggcgtcgagagtttcgtattcacaagcaccacaagcgccttcggatcagcgttgacaccgtccccaggcatgcctgcatcctggataactgaagaggttgttcccataccaaagaatatttatggcgcgacgaaacttagtgccgagcacctctgcgaggtgttcgcgtctaggcggaagttgccaacgatcattctaagaacgtcgcgattctttcccgaggacgatgattctccttctgtccgcaaccactttagccgcgacaatgcgcaattgaacgaattgctctatcgccgcgtcgatctagacgacgtcgtgcaggctcatctgcgggctttagaactggcgccgcaacatagttttggccggttcatcgtctccgcgccgacaccctttagcaagggcgatcttgacgagttacggcgcaaccctggtgccgtggttcgcagactgttccccgaagctgaacgggtctacgccgcaaggggttggtcgatgttcgacgagatcgatcgcgtctacgtgagcgacctcgcggccgagaggttgaagtggacgccgcgatgggacttcaaccgagcattgaaacttctgcagaacggcgaagactttcgcagtcctctggcccgtaccgtcggcagcaaaggctatcatgacagggagttccaagagggaccctatcctgttgggcctcagtagcaatttcagcatacttggtccacttgatacacgggaggcacgccggtttgagcaatggcttttgcctccacgggagaagaagtaatatctctctgcgatgacgcatcgccgggcttttgaaaaagtgattcacttctctcatcatgtactcgatctcagcatcggagatggcgacatcttccggtcttccgttccacggctcgtctgttgtgccgatgacggtgtaatcgtcttcgtatggaaagcattccatcaggcgaccgtcgctggtctgaagcggcacgacacctagcgtatccgaagaaatccactgcgagcagctggtgtgccggcctcagcgaggccgcatggtttgtcatggccaattgaaggaagcgaagcgatgggatttggaatgaagttgattgcgtcgacgacgatgtgtcttctgcttggtgccgcgcacgcatcggcatccgagaaactcaaggcggtcgacctcgcggccggcaagagaggcgatcgaacccagtttcgtgacatcagggatttctgcggcacgaaaccgatgaggacaagccggtggtggctttcaagatcggccgctccgaggccggcgccaaggcggcagtgtcgcacaccggcgcgctggccggctcggatcggatgtacatgcctcgtggaccgcacgcgctgcttgccggatttccacctaccttgttgcaggtgagtgcgatcgagacgctcgcctatgacagccggaatttcgcagcgcggctcgtggacgccggcgttcgggtcaatctgagcatctggccggagcttccccacgtctggcacgcttttctcggcttgtttcccgaggcgatcgaggcgttgcaggagattgcagcgttcgtgaacgggggcatcgatcgctgaacggttgcgcgcccgtctggccgttcccaccgtcggatctctggcggatcgcgtgggggtcgactaacaaggcatctgtcgaacgatgcaggacagctgccatgtttgaaggattcgagcgtcacgatgtcgagaccgaaggtgcgacgatcgcctcgttcgtaggcgggagcggtcctcccttgcttctgctccatggatacccgcagacccacgtcgcctggcatcgtatcgccccggtcctggcgcgcgactacaccgtggtcgccaccgatctgcggggatatggcgacagccgcggtccgcagcatgtcgatgcatcggcttactccaagcggacgatggcgcgcgatcagctcgcggtgatgaagcagttcggtttcgatcgcttcgccgtcatcgggcatgaccgcggcgcgcgggtcgggtaccggttggcgctggaccatcccggagcggtgcaggctttcgtatcgctgacagtgatcccgaccagcgaggtctgggcgcgcgccggcagggattttgcgctcggcgcctatcactggctgctgttcgcgcagccctatgacctgcccgaacggctgttgagcggcgatccggatttcttcctggactggacgttgcgaagaatggccaaggatctcgttgccctgtcggatgaggcccgcgccgcctatcgcgaagcatttcgccggcccgaggtacgacacgcgatgatgcaggactatcgctccggcgcgagcctcgaccatgagcatgatcttgccgatcgcgccgccgggcgaatgctcgattgtcctgtgctggtgctgtgggagcagggccgctttggtgagacggatactccgctccagatctggaggagctgggctgtcgatgtcgatggtcgggctattccgggcggccatcttcaaccggaagagcagcctgaggccgtgctcgacgccgtcagttcatttttcgcacgcaagctcgggtgaccaagcgaaggcggtgatcgaggcgtcgggatcaccggtcgagccaggcgtcggaaaaatcccccgcggtcaggtcgacgctgttgtaaagattgcgcacgcgcgcattgctgacgagggttgtctccagcgctaccagtggcaaggctggcagatcgtcactggcgatcttctggatctgccggaattgatccgcgcgccgcgcttcgtcgcgctccgtggctgcctgccggaacagctcatcaaccgccgggttattgtagtgggccgcgttgacatagggcagcgggtgcttgattccgtccgaccagtagatccgctgcacgccgaccgtcgggtcgaacagcaggccgagcccgttgaggttgatgtcgaaatcacggtcgtaatagacccgcttgatgaaggtgccgagatcgccgtcgaggatgtcgacgcggatgccggcacggccgagggcggaccgcaggtagccggcagtcgccttgaatgcggcccccggaatgaaggtcagcctcagtgcaaaccggatgccgccgcttccgcgcttcaatcccgcctcatcgagaaggcgattggcctcgtcgagattgaagggatggtcgaagctcgtcgggtcgaagtaggatgaaagcacttcgggaatcggcgagcggatccggctggcatagccgtaataaatccactgccggatgaaatcgcgatcaatcgtgcgcgcgatggcgtgccgcacggcgcgttgggcgaggtattggttgtcgaggctgaactccagcacggcggcgttgttgagataggcgtctcgctgagacgagacgacaagcttcccgccctctgccagccgtttcacatcgccgagcgaaatgctgccgctggtgtcggcttctcccgtctcaagcgccgtggaggccgcggccggatcaccaacgaacttgaccaccacccgatccagaaagggccgctcgggccgccaatattgtgggttccggcgcaggctgacgtggctgccacgtttccattcctcgaagatgaatggaccggttccgatcggcgcgttgttgttggcgctgccgtcgagattatcgggctgataggcgtgacgcggaacgatcggcgattccgcagccgcgagcgccttcaggaagtagggtgtcggcttcgacagcttcaccacggcggtcagcgcatcgggcgtttcgacacgatcgagattggcgaagctgatccggccacgcggcccggccttttgcagcgcttgcagcgaaaactggacgtcggcggacgtgaagtcggcgccatcgtgccatttgacgccgggacgcaaggtgaagttatattcgagtccgtctgcactcgacttccaggccgtcgccagaagtggacgtggtatgaaatctgcatcgtaagccagcagaccctcggtgattttggtgctgatattgcgggtctgtgtgttggtgtcgagcaagggaacgagcgttcgcggttccccctgtgtgacgacagtcagcgtcccgccacgccgcgcttcggccgcgagcgcaggcgagccggcgagcggaagcgcgagcacaccggcccccgccttcaggacacttcgccgatcaataagaccgcggatacgatcgtcagtcgtcaccatgtgccaagctttccattgttgcgtgttgaaggcgtgcggcctgtttgcgcagcgtcgccaggatcgatcgtttcagctcaccgaacgagcgcatcgcgatgatttcctgataggcgcgtggacggggataggggacgatgatctcttcgacgatccggccaggacggccgctcatgatggcgatgcggtccgacaggaacagcgcctcctcgatgtcgtgcgtgacgaacaggacggtggagcggcgctgctcgcgtgcggccaacagcagctcttgcattgcgagtcgagtctgggcatcaagcgccccgaatggctcgtccatcaagaggagcagcggctgcgatatccaggcgcgggcgatcgcgacgcgctggcgcattccaccggacagctcatagacggcatgatgctcgaagccgcgcaggcccatcatctcgatcagctcctgcgcccgtggccgatattcggacgccgggcgcccggccagacgcgatgcgaaggtgatgttgtcgatgacggacaaccatgggaacaacgtcgcttcctgaaacacgatgccgcgatcgggggacgggcgtccgaccggcttgccatcgatcgtcacgcggccgcgcgtgggttgttcgaaacccgccagcaggtcgagcacggttgatttgccgcatccgctgggtcccagcaggcacacgaattcgccttccgcaacgccaagcgaaagtccgtcgagcgcgacggtcttgtgtcggccgcgccggtcttcaaagcgcttctcgacgtcttcaagcacgatcagtggagaggtcgtcatctcaggcgcgccctgaccaaggggccacccagcgctgcagccccaccagcgccaggtccagcgcgtagcctgtgccgccgagcatgacgatgccgagcatgacgacgtcagtgcgcagataggagccggcgttgacgaccatccagccgatcccggcgtcggaggcgatcatctcggccgcgatcagggtcgtccagcctatcccgaaggacaggcgcagcgtcacgaacagctcgggcaggatgtggggcaggatcacgtagcgaaacaacgccaggccgtgagcgcctagcgcccggccggcgcggatccgttgtctctgtacggtgctgaccgcagctgccgttccgacaatgatgctgagcgcggccgagatgaagatcaaaagaaccttcgaggtttcgccgatgccgaaccagaggatcacgagcgggatcagtgcgagcttcgggagcggccgcaggaattggacgaaaggatcgagcacggcgccaaagcccggcgctgctcccatggcgagcccgagcggcacaccgaccagcgtcgccgcggcaaacgcgcccagagcgcgggcgagactgagcgccaggtgttgccagagcggggtgccacgatagccgtcccgcgccagatcgatcgcggtcgtcacgatctcggatggcggcggaagcaacaacggttcgaccagatgagtccgcccggcgatctcccacgccagcgtgacgccggcgaccgcggcaaggccgatcaggaaacgacggctggcgttcaagacgggaacgcgcgccgcagcaatgcgtagttcaccgcagggacgaacgaggcggggacgtcgtcgcgtttgatctcgcccgtctcggcaaggaaggcagcggcatcgccgagcgccttgatgagcggtgcatcctttgctgcggccggtccatcgccccaatatttcggaccgagctgatcctggaaggtgggatagcgcagcccggccagggtgtcgcgcacggcttcgaacggtgcgccgaaatcctttgccagaatccgcgacacgccctccggatcggaccggtatcggtcgaactgcgcctgaacggtctgcagccaggccaccactgtctcggggaatcgctcggcgaattcgctccgcaccacggcgctgttccagacaaagacgcctgagggctgcaattgttcggagaccagcaattgccggccgccgtcggccaggagctctgcccagaacgggccattgatataggtcgcgtcgatgtcgccgcgcttccaggcggcgatcgtgtccggctggctcaggggcaggcgcttgatcttgccggcgtcgagcttgttgatacggatcacggcctcaagcgcgaaggccatcgtggaggagggggcaaccgcgatgcgcttgccctcgagatccctgagcgtggtgatgcccgccttggcgacgagccgctcgctggtggcgacgatctccggcgagcccagaatttgaatgggcagtttgcgcgaaagcccggccacgatcggcgtgttaccgaagatcgcgaaatcgatctgcttggcggcaagcagcgacagcgccggtccgcccgatgggaacggtacccactcgaccttgacaccaagcgccttgtcgaaactgccgtcggtcttgccgaccacccaggcccgcgccgccgtcagatagccgatgcgaacgacatcgggcttcgccgtggtctgtgcgcggctgcgtgctgccgtcagtgacagcaggcccgcgccgaggcccagtcgcagcacgtcgcgtcgtcccggcctgctcgcgcggatatatgtcgtcatggtacaccttcatgcatgaggcgtgcagatcgtcatcgcgacggcggcgagtcaatcgcggccgaaaaataagatattcgtttcagcgtgccgcggacgaacgcaatgaattgcgcttccgtcgcacgtgatgaatgagattcattcttcgggaagacgctgaaggcagcgttgatgaagttcgtcgtctgcgggcggagcagagctgaatcattctcagttcgcgaacccatttggaattgacggcgacaagcgcgaacgcccaaatgcgtaaacgctcggcgtcacaaaattcaactgaaatccgttactcctcgaagaaagttaacatgaagcgcttgttgtcgtcgctgctggtatcgctctcggctgcgtggttgcgggcttcggcgaaagaaccgcgcccgtgcgccacttgatcgagattccgcgcgccacgcatttcgtcgaagtcgagacggggcgcgatgtgctgttccgtgaggtgcagagctttcttgaccgcaattgaccggtcttgggtgaccgatggcaccggctgcgttcaccgcgtggaacgttatcggtgcggatgaaagcatgtcgccgcggcgcaatgcgcgaagtatggtttttccattccggcgcccatctttggtttagagtttcattgagtgcgcgcggagttttttgcactatgcgctaccccattcaacaaagctgcaagatcgcacgacaatgaaacatcgcctgctcgcacttattgccgtagtcacgctccttaccgcgcctgcttttgcggatcagaagatcaaggtcggaatatccggaggtgattccgagatcgtctgggggaaggtgaaggagatcgcagccaaggacggactcgacgttcaggtggtggtattcagcgactacctgctgccgaatgccgcactcgatgccggtgatctcgacgccaatgcgttccagcacaagccgttcctcgacaatcagatcaagacaagaggctacaagatcactccggtgggggagaccatcgttgcgccgatcggcctctactccaaaaaggtaaaatcggtctccgagatcgaggatggatcatcgatcggcattccgaacgatccctccaacggcggccgcgcgctgctgctgttgcaggctcagaatctgatcaagctcaaggatggggtcggcatcctgccgaccgtgctggacattatcgacaatccgaggaagctcaagattcgcgagatcgatgcggcgcagctgccgcgcagccttgacgacgtcgacgcggcggtgatcaacaccaactatgccgtagcggccgggctgatcccaggcaaggattccatcgcgatcgaatcctccgtcgacaatccgtacaataatttcatcgccgtccgcgagcgcgacaagaatgccccttgggtcgccaagctggtgcaggcctatcagaacgacaccatccgacaactcatcaaggataagttgcccggacagatccccgcgttttgaggcacgagacgggcggatggattcatcaattgggcgtttggcgttggccgtaggcatagtgctcgccaagcggaagccctaaggcactgggtttcgcgttcctgccgcttatcggaaacgtgatgtcggttgttggcccccttgatggagggcaagacaacatgtgacgcgagtgtcgcgtcgacgctcgctgagacacctgatggcccttgcttcgtaacttcgaaggtcgtgctcggccccgaggtcggcggaccgagggcccattccattcatcatggcaaatttgacatgcaaacgagcatctctttgcaacactctttcatcgcgagactgaaggacgaaagccttttttcgatgcggctgattacaaagaagttccgttcgcgcacggtcggctatcgagcgcgcttcccgtagcccccacccgcgagccgaggaacggcaatgtccacgtcccgacgtcagatcatcaccagcggcctcggtctccttggtacggccttgctttcgccgcgcgtcagtatcgccgcgccgggcggcgacgtgccgaaggagttcaaggtcggtttccagaagggcgcagccattttggttctggggcgcgagcagcaagtgattgaaaagcggctgaagccattgggtgtggacgccgtccaatgggtggaatttcagttcggtccccccatgctggaagctcttggcgcgggggctatcgacatcggctcggtgggcgacacgccgcccatcttcgcgcaagccgccggctccccgttggtatatgtggcgtctacgccgtccgccgagcacgccgtgctggtgcaacacgattcgcctatcgagaccctggcagaactcaagggcaagcgtgtcgccttcgcccgaggttccagcgcccataacgtagcggtcaaggcgctggcgctggccggcctgggcctcaaggatatcgtgccgacctatttggcgccggcggacgccacggccgcctttaacggcggtaccattgatgcctgggtggtgtgggatccgttctacgcgatcgctcaggagcgctacaatgcgcgcattattgccgacacctccgacaagcggctggccagttcgtcgtactacctgtcgagccgtgacttcgccgacaaatctcccgctgtgctgtcggctgcgctggacgagatcggcaagctgacggagtggtccggccagcatcgtgaagaactggccaaactggccgctgccgccaccagcatcgacgagagatcatggcgcgctgccttcgcgcgggcaagctttaccttcggtgaggtgacttcagcgcaggtcgctcagcagcagcaactggctgacaccttttatgaacttggcatcgtgcccaagaaggtcacggtttccgacatcgtttggcatcaacccaggagctgacgtcgccgcggcgtatcggcgatgaaatcgggtgcatccctcaggtgtccttcaggaacatgggatcgatctccatggacggaggttgagcggcactcatgaataccggctggattgtgtgtgatttgaactgccacgaattgctgtcgttcagcacgcactcattgatcaaatccgccaccatcattggaggatttgactgacgcgtggatggataggtcagaccgccgtagaacacgatgatgcctaccactgtcgcggagcgttcgctgctcgacgtgacgtgcagattggtgatcaggtgccgcacggctttcacgccactgatcgccagtcgatccgctgcgttctcgccgatttgacgcgcgcgccactcataaaatgcgcggatcgcttcacgtccctcaaaccggttgtgacccacgatcttcacgccgtccggcgtgaagaagtcatgggccgtgcgcccgtcgttgaagtcgacgtcatgccaatatgtcacctcgagacgatgaagggcatgccagagaagcaggtcgtcgtggggtgtcatcggcatccaggctactccggagagctggcggctccgctgccgaccttcatccgcgagcggaaccgatggaacgctagtgcaccgttgcgaaggtcgcgagatccgtctcgccatcgccctatgccccgacgatagcatcatgcaggtgttctgcccgacgtgtcaaacagcttgatccgacacgtttccgcgcgcacatggctgttcgtgcaagcccttgatctggctcggctcggttactgtgcatggggttgttttcgccgttttggcgagaagtcgatttgcgcccagcgccgctgctgcaccggcggtcgaaacggctcggcactggatcaagcccgggcctttcggccgcgacacgcactcgctcaaggtgctgcccggcgtcgttcgctcgggctgctccgaccggcaagttgattgatacggcgacgttggctgatcctgcagagtgcaccccgaagaccggcgcaggctttcgctgttcgaccgccgtttcgtgtcacgtcggcgcagcatcggattgtcggcttcgcatcgtgttggatcgattttatccatcaacgatgcggcatcgcgaattatttttcaaacttcgcctgcggacaatgtgtcgatcgtttgcatgttgcgctcacgcgcagccacgacttagatcgcactgcaacagaagagacgcctgcaagaaatggctgatgcgctgacgttcgccatcttcccgatggggaatgttcgatgcgccggcgatgcaggtactggaacataagtgcaggtgatgcgaatgaagaacaatagtttgctcgtaagcgggattgccgttgcgttgctggggataggcgcggcgcaggccgcagatcagccggtctccggtggggcgttgacatggggtgtcacgaccgagccatcctgcttcgatccccaccgctcatcgcagcaagcggcgttcttcgtcgcgcgcaactatatcgactcgctgatcgcgaagaagaccgacggcactttcgcgccatggctcgccacggagtggtcgatttcagcggacggcaaggaatatacctacaagctccgcgaggacgtcgttttccacgacggtgagaaattcgatgccgcggcggtcaaggcgaatttcgacttcatcttcaagccggagaatgcggcgaccgcggtctctcttctgcagactttcgatcacgccgaggtggtctcgccctacgtcgtgaaactcgtcttgtccaagccggactcgagcttcctggaatcgacatcgaacgtgaagctgggactgatttcgccgaaggcgctggagaagggtgatttgtgcggcggcgggcgcgcattggcgggcactggtccgttcatcttcgagggctacacgcgcggtcaatccgcggtgttcgttcgcaatccagcctacaaatggggaccggggaacgcggcccatgacggcccggcctatctggatcgcgtgacgtttcgattcctgcccgaatatgccgtgcgcaccggcgctttgacgtccgggcaagttgacctgatcgagggcgtgcagccgaccgatgcgccgctgtttgcagagcagccggacttcaagctgctgaccgggccatccggcgccagcacctccttcaccttcaacattaattatacgcgtccgccggccgacgatgtccgcgtgcgtcgggcgttgcgcgacggcttcgatctcgagccgatcgtcaagcaggtctacctgggaacggtgccgcgtgcctggtcgatcatcgggcctgccaatcctgcatacaacaaggcgctcgtcggctcttggggcaacgacatcgcgggagccaacaagctgctcgatgaagccggctggaccggccgcgactccgaagggtttcgaaccaaggacggcaagcggctgtcgatcgaggtcggctatccccaaccttatgtgcgggacaatcgtgacatcctgattcagggcgttcaagcgtcgctccgcaagaatgtgggcctcgatctgaatttgcggctcatcacggccggcgagtatgccaagaacaacgccaacggcacctggacgatctacccgaacacggacaatccctctgatccggcgcgcgaactctgggacatgctcggctcgaagggattcctgtatgccaacatctccaatccggatcccgagatcacccgccagatcgatgaagcgcttgcgtcgactgatccggtacgcaaacgggagctgacggatgcggtccagaagcgtggcgtcgatcaggcctttatcgtgccgctgtttgcgccaagctggttcctggcggccaagagcaccgtcaacggtttgagcttcgaggctggcctcgactcgccgtccagtgcttacgacttctggatcgcaaagaagtagggcagacggatgtggtctcgtatcatctccaggctgttcaccagcctggtggtcgcctgggcgagcgtgaccgcgacattcgtcgcgctccacgctctgccggggcgcatccaggatattcttgccggagacctcgaatatcccggcctgcgcgaagcgatcgccgccgaatgggggctgaaccgtacgctgcctgagcaatatctcgatttcctgttgcgtatctttcgcggcgatttcggcacctcctacgtgctacggcagcccgtgatcgaggtggttggttcgcagctgctgccgacggtcgagctggccctgaccgcaggcgtgctcgcggtcgtgatcgcaggcggcatcgcgctcctgaccgccggccgcggcaatttctcgcgagaggttgcatcactcgtcgaactggtgttcgcctcgacgccggtattctggctcggcattctgctgctgatggcattctccttcaacctgcgctggttccccgtatcgggcgccgaggggtggaagtcgatcgtcctgccgtcgatcaccctggcgctgccgacggcgggtctgctgacgcaggtcctgcgcgaggccatggagaagacgctcgaccagccgttcgtgacgacggtgcgggcgcgcggcgtcggcgagttcatcatccggtggcgacacgtgctgcggcatgccttgctgccggcagtgacgttgggtggctggttgatcggcggcctgctcggcggcgcggtgatcaccgagaaggttttcggccggccgggtctcggcacggtgacgctcggagccgtgcttacgcatgatgtgcccgtggtgctgaccgtggtgctgctcgctgcattcattcacgtcgccgcctcgaccctgctcgacattctttatgtgctgatcgacccgagattgagggctcaatgaccgcgccgtcgcaccgctcattcgagcaagccgtcccgctcgatcgacctgaggacctcgtcgggttcgaaacttcgcttccagtgcccgcggttcggcgtcgtccgcccctcgcgtttgtggtggccgtggcattcgtgctgctcctgatcgctgcggcgacggcgccgtcgctgttcacccatttcgatccgctcgtcggcgatttcaccgaggggctgaagccgccaggctgggcccatctgttcggcactgatcgccttggccgcgacgtctttgcgcgaaccatctatggcacccggtactcgcttctgatcggcttcggcggcgttgccgtcgggctcggtctgggtgtgattctcgggatcatcgccggccagcgcaatcggatcctcgatgaatccgtgtcgcgtctgttcgacatgctgtcgtcctttccgggtgtgttgcttgcgatgttgatcgtcaccttcctcggccagggcatgcttaatatcgcgatcgcagtcgggatcgccggcattcccaagttcggccgcgtggtccgggcgcagacccaattggtgcgcgacgcggattacgtgacacaggcaacaatctatggattgagccaacggcaggtgtttctgcgccacgtattgcccaatgtgctggtcgccattccgatcatcgcgaccgtctatatcggcagcaccatcctgatcgtgtcgggcctgagcttcctgggtctcggcccgcagccgccgacgccggaatggggcgtcatgctggcggagagccgcgacgtgctgcgggtcgcgtggtggccgggcgtgttcccgggccttgcgatcacggccacggtgatcgccttcagtgtggtcggcaacttcctgcagaagaaattcgaggggcggatggcatgagcaccggtcaatccgcgcccgagctaaaggctccgctggtcgagatcctgggcctgaatgtgggctttgccggcgcaaatgccgacaggccgatcgtgatcgacgtcgatctgacgatccggcccggcgagtgcgtcgcactggtcggtgagtccggctcaggcaagagcgtgaccgcgcgaagcctgttgaacctcgctggagagggggccacgacaaccgcccgtcgcttcgagatcaagggccgcgatgtgcgcggctatcgggaggccgactggcgcaagctgcgtggaacggtcaccggtctcgtcatgcaggatgcgctggtctcgctcgacccgttgcgcacgatcggacaggaggtcgccgaagtgatctccagtcacgggattctgaccgatcccggatcgatccgggagcgaacgctggacacgctgcgcagggtcggcattcccaatccggcggatcgcgccatgcagtatgcgcatcaactttcgggcggattgcgccaacgtgcgctgatcgcatcggcaatcgccgccaatcccgatctgatcattgcagacgagccgaccacgtctctcgacgtcaccgtgcaagcgcaagtcctgcaagtgctcgcggaacgaatccgcgacggtgcgggcgtattgctgatcagtcacgatctcgccgtcgtcgccggaatcgcggaccgggtgatagtgatgcgtgacggcagggtcgtcgacagaggaccgacccacgacgtgctgacccggccacgacactcctatacgcggcagttgatcgcggccgttccgtcggtccgctcacgcggagcgcggctcgcgtcggcgcgaattgagctcgcggcagtgaacgccggaaacggagataccgttacgatcacgcgtgagccgttgccgtcccgccgcgaggccggcgaggtggttctggaggtcgagatgatttccaagagctacatttcgcccaaggcgacggggcgtgtccgttcgactgtgctgcaggacgtcagcttcgacgtcagggcgggcgaggtcgtcggcatcgtcggcgagtcgggttcgggcaaatcgacctgcgccaagatcgttctcggcctgctttcacccgatcagggagaggtgcggttgctcggtcgcccctggtcgactgtctcggaagcagggcggcggccgcttcggcgtaagctgcaatatattccgcaggatgcgctcagcagtttcgatccccgctatcgcgttcaggacatcatcgctgaaaatctcgcgggcctgccggagcgcaagcagcagcgtgaacgcatcgtttcgctgcttgagctcgtcggtctgagtgccgaatacctcgaacgccggccgaggtcgctgtccggcggccagcgtcagcgggtctcgatcgcgagggcattggcggccgaacccgccctgatcgtctgcgacgagccggtgtcggcgctcgatatctgcatccaggctcaggtgctggacctgcttgcggagttgcagtcgaagcttggcatggcgctgctcttcatctcgcatgatctcggcgtgatcgaacatctggccgatcgggtgctcgttttccacgacggtcgcgtggttgagcagggcaccgtcgaggcggtgctcggacatccgcaacagccctacacgcgggcgctgctcgccgcagtcccggatatccagcgtggattgaccgcccgggcgcaagttgccggcgcaatcgtcgccggtcctgctcaagggacagaagccgcaacaggaggatagcgatgacgcagatcgatcaagcctggggcagtggcccgtcgtcacgatatgaagaccttgccgaaccctttcggccgttgttccgctcgatcaaggacaccgccgtcgcgcgcgatcttgagcggcgcctgccctatgacgagatcaaggcgttgcgcgcggctggcttcacgaccgtgcgggtgccggacgagtttggcggtgccggcgcgacgctgccggagctgttcaacctgctgatcgaactgtcggaggccgactcgaacgtcaccaattcgctccgctcgcattttggcttcacggaggacgtgctcaactcggccgatccaaagcgccgcgaactgtggctgcgccgcatcggcgagaagaccctgttcggcaatgggcacagtgaggtcggcgacaacaagctgcaggcgttctcgaccactgtttccagcaaggacgggcagctggtgctcaacggccgcaaatactacacgaccggcacgctgttcgccgactggatcaacatcgcggcccagcatgagaatggcgagccggtcggtgtcgtcgtttcccgccattcgcccggggtcgaggtgctcgacgattgggacggctttggccaggcgctcacggcgagcggcacgacgatcttcaaggatgttccggtcgagggtaaccaggtcattccggtgaccgcacggttcaaatattccaatccattctaccaactggtgcaccttgcaacactcgcgggcattgggcgtgccgcggccaatgacgttgcgcatctggtcaagcagcggacgcgggttttcagccacggcaacgccgatcgcgtagcggcggacccgcagatacttcaggtggtgggcagggtacgcggcaacgcttatgcggccggggcaatcgtgctcaaggtcgccgaggccttgcagcgcgcccatgaatcgcagctctctcaggatgaggatcgaattgccgctgctgtcgccattgccgagctcgagctcgatcaggccgtcacggttgtctcaagcctgatcctggaggcgaccacgatcttcttcgatgccttgggtgcatcatcggcagcgcgcaatctggcgcttgatcgctactggcgcaatgcacggaccatcaccaaccataaccctcgcgtttatcgggatcgcatcgtcggtgatttcgcggtcaacggaacacctccgccgggccagtaccggatcggcacggcgtaagacggcggctggctgcatcgcctgccgaacgacgcgcctgcgaccgcgacggttttccttcacactggtcgagccgtggaacgaatgtgttggcgatccgacctgcgaggctctgttcatcgtttttgtcgcggctcgattgataagcaggttgtgcgggctcacaatttcgccgtcgtagcttactcaagcgaagggacttgcgatgagcttcaagttcaaggacgtgttcaccggaacccaggctgcattgggcgtagacccggcgcaggctcaggccgcgttccatgcgcagtcgcgcctcggtgatggtgtcaatagcgccgtttcaatccgccagtttcatgtcgcggtggacgagcctccgggccttggcgggaatgacaccgcgccgaacccggtcgaatacgtcctggctgcattggggtcctgccaggagatcacctaccggctctatgcggacgcgctcggcattccgcttgatggtgtctcggttcgtctcaccgggacaattgatttgcgcggcttcttcaacgtgcaacccgacatcagagcgggctttcaggggatcgaagccgaggtgatcctcgacagctcagccccgcaggcggagctggagcgtctcaagcaggtcgtcgacgcccattgtccggtgctcgatatccttcgcaatccgacgcctgtgcagctttcgctgcggcagggttcgttgagcgcggccgccgagtgattggaccgcgaggtttcgagcatgacgttacccctgcgatttggcgtatgggcgctcacccatggcagctgggcctcccgacatcatcccagcgatccgcccgatgcgtcatggaaacgcgttcgtgcccagatcttgcaggccgaagcgcttgggtatgaatccacgctgcttgcgcagcacatcatccatccgagcggtgacgaccaggatctgctcgaaacctggaccggcgcggccgcccttgccgcgctgaccggccggatcgagctgattgccgcgatcaagcccttgctggtgcacccggtcgtgctcgcgaagatggcgctgcagatcgagaatatcagtgaggggcggttcggcatcaatctggtcaatgcgtggtaccgtccggaactggagcgctcgggaattggctttcccgatcatgacgatcgctacgcctatgggcgggagtgggtcgagattttcgagcggctgacatccggccatcgcgtggatttccgggggcagcacttcagcatcgaggcctatcaattgcgtccgcgcgacgagttccggccacgaccggcgatctatcttggcggcgagtcggaagcggcacgggcgctcgcggctcacgccgcggatgtctatttcatgaatgggcagccgcttcaggatattcgcgccctgatccaggatgtcgcccacaggccgcgtattggagcgccgatccgcttcgggatgtccgccttcgttatcgcccgcgagacggatgccgaagcggaggccgagctgacgaagttgtttgccatcgcggagcaagacaagccggcgcgcgcccggttggtggcgaatgcggatcccgaagcgcagatgttcaagaccgcggccaaggaggcaagagtcgggaccaatggcggcacctcggcgcggctggtcggcagctatgacacggtcgccaggcgtatcgtcgagttcaatgcgattggtgtcgaactcttcatgctgcaattccagccggtcgacgagaacatggcgcgcttcgccgaacacgtgattccccgcgtgcggcacttgcagggcagggccgcagcttagcggcgtgacaccctgcgggtctcgccatcgaggacttgcagggtgtcattgcatttcaccgaccgaaacgttttccgcgtcgcgctgcatcggcagcaatcgtctatttcggtagcgcaatttgatatggacacgaaatcatcgcgaccataacgttttgaagacatcaaaggcgaaattgcgccgttgatgcgcgaacttgaactcagaaattttcgaaggtagtcccgatgagctttcgtccgttgcatgatcgtgtggtgatccgccgcatcgaggagaccaacaagaccaagggtggaatcatcattcccgacaccgcgaaggagaaacctcaggaaggagaagtcgtcgccgtcggcggcggggcgcgggatgaaaccggcaagctgcatccactcgacgtgaagaaaggcgatcgggtcctgttcggaaaatggtccggaacagaggtcaagatcaatggcgaagatctgctgatcgccaaggaatccgacattctcggcgtgatcgcctaggcctcgtcatcaacaacacctcaacgatgtccaaccgcgcagtcttgtgcgcggcagggacagtcttgctcgaaggacagtgcatatggctgcaaaggatgtgaaattctcgaccgatgcccgcgatcgcctcttgcgcggcgtggacacgcttgccaacgccgtcaaggtgacgctcggccccaaagggcgcaatgtcgtcattgaaaaggcgttcggggctccgcggatcaccaaggacggcgtgaccgttgccaaggagatcgagctcgaggacaggtacgagaacatcggtgcgcagcttctgcgcgaggtcgcttccaagaccaacgacctcgccggcgacggcaccacgaccgccaccgtgctggcgcaagccattgttcgggagggcgcaaaggccgtcgcagcaagcctcaatcccctcgacctcaagcgcggtatcgatctggccgtcgccgaagcgatcaaggacatcgagaagcgggcgcgaaaggtccagtcctccgaagaagtcgcccaggtcggcacgatctcggcgaacggcgatgtcgcagtcggaaagatcatcgccaacgccgtcaagaaggtcggcaatgacggcgtcatcaccgtcgaggaggcaaagagcctcgacaccgagctcgatgtcgtggaaggcctccagttcgaccgtggttatctgtcgccctatttcgtcacgaatgcggagaaattgctggtcgagttcgaggatccctatcttctgatccacgaagccaagctgaattcgctgcatcccttgctgccggtacttgaggcggtcgcgcagtccggcaagcccctgctgattgtcgccgaggacgtcgagggcgaggcgctcgcgaccctggtcgtcaacaggctccgcggcggactgaaagtggctgccgtgaaggcgccggggttcggcgatcggcgaaaggcgcagcttgaggatatcgcggtcctgaccggggggcagacgatctcggatgaactcgggatcaagctcgagaatgtgacactgtcgcaacttggccgtgccaagcgggttcggatcgacaaggagaacacgacgatcgtcggcggcgccggcaagcgcaaggatatcgacagccggatcgcccagatcagggcgcaggtcgaggagaccacttcggagtatgaccgcgagaagctgcaggagcggcttgccaagctctcgggcggcgttgcggtgatccgcgtcggtggcgcgaccgaggtcgaggtcaaggagaagaaggaccgcgtcgacgacgcgctcaatgcgacgcgcgcggcaatcgccgaaggcatcgtgccgggcggtggcgttgcgctgttgcgggcgaaggccgccatcggccggctgagccatggcaatcccgacgtgcaggcggggatcaacatcgtgctcaaggcgctggaaagtccgatccggcagatcgccgagaatgccggcgttgaggggtccatcgtagtcggcaagatcctggagcagcgatcgccgacctacggcttcaacgcgcagaccgaggagtatgtcgacctgatcgaggctgggatcgtcgacccggcgaaggtggtgcgaaccgcgttgcaggatgcggcctcggtcgcctcattgatcgtgaccacggaagcgctggtcgccgaactgccaaaggacaagccagcaatcgcagctcccggggcggggggagagttctgagcagccggccgtctcgccggtcgattgatcagaacgggactgtcgcgaggagaaacgaccaaacggcggctttggtcgggtctcccgcgacagtcggctccgccaccaagggaccagccttcctggccgcagcaagaagggaagacagtgtcacaggagagcctgtatcgttcgtccaaactgggccggacatggcgagatttcgcgattggcctggcgctcttcgggttgcttgccagagtatcgctggtttcggccgatgaaagaccgctcaggatcggtcttgcgaccagcatatcgaaccaggccgccgagattgcggcgcgcgaagccaaggcgcagggcctgaacgttgaactgatcgagttcaacgactggaatacgccaaatcgcgcggtcgccgaaaaggagatcgacgcgaatctgttccagcacgttccattccttgaattcagcatcaagaatgcaggctacaagctcgttcccgtcgcgccggctttcagcactccattcggactctattccaagaaatacaagtcaatcccggatctcccggacaatgcccggatcgcgatctcaagtgatgccgtgaacaccggtcgagcgctgctgctcctgcagcgagccggcctgatcgagctcaagccgggggccgatcatcgtgcaaagatcgaggacatcgtcgcataccgcaagccattgaagctggtccaactcgaagggccgcagattgcgcgttcccttgatgacgttgacgccgcggcaacctatccgacgtttgcgaggcttgcggggctcgatccgtcctcgggcctgatcttcgagaatgaaccgatttatgcctttcagttcgtgacgcggccagaattgaaggacgacgcgcgcctgagccgtttcatcgcggtctatcgcgactccgaggctgtgcatgccaagttgcgcgagctttacggatcgctcgtgaccttcccggggtcgtaggcaagcaaaatggtctcgatttcccgacgaacgttcgtcacggcaagcgtggctgccctcgcggcgccggctggcggtgcgcgggcgcaggagggcagtccccgcgccggcgggcggctatccttcgtgatccaacccgaaccgaccacgctggtgtgcttcaacacgacggaggggccggctatccaggccagcaccaaggtggtcgaggggctgctgacctacgacttcgagctcaatcccagaccgcaactcgcaacggcctggagcgtcagcgaagacgggttgcaatatcgtttcgagttgcggcggaacgttaaatggcatgacggccagccgtttacggccgcggacgtcgtttattccatcggtcttctcaaatccgcgcatccacgtggtcgtacgacctttgccaacctgctcgaatccggtgcggtcgacgagcatacggtcgtgcttaaactgtcgaagccagcgccgtatctgctctacgcgctggcggcgggcgagtctccgatcgtcccgcgtcacatttacgacggcaagggcgatccgctgcagaacccgaacaatcgtgcgccagttgggaccgggcccttcgtcttcaaggaatgggtgctcggcaactatgtcggttatgtccgcaatccgaactactgggacagcccgaagccatatcttgacgccttgctggtccgcgtaattcctgacggggctgcgcgcgccgtcgcatttgaaaccggtgagctcgacctcggcggatcgacgcccgtttcgccgctggatctcgagcgcttccgctcccttccgcatctgggccaggagacgcgtggttacgaatactctccgacgctgtacggcctggagttcaatctggatcatccgatcctgaagagcccgcaagttcggaaggcgatcgcgcatgcggtcgaccccgccgtggtgctcaacgtggcctggtacggactgggagaacggacggtcagcatcgtcagtccgaccttgaagcggttctacaacgacaaggtcccgacatacccttatgatccgaaggcagcggccaggctcctggacgaagccggcttccccctgagaggccgttggcggtttgcgctgacgcatgacttccaaccctttggcgagaacttcaagcgcagcggcgaagccctgaagagcgcgttggccgccgttggcatcgacgtgaccgttcgcgggcaggattttccaagctatctgaagcgggtctataccgaccgcgactacgacttcacctttcaccccttcaccaacatgttcgatccgacggtcggcctgcagcggttcttcaccagcgacaactatcggaagggtgtggccttcaccaatgcgagccattactccaatccggaggtcgatcagctctttgcccagattgccgtcgaatccgacacgaccaggcgcagggcgctgattgatcgctttcaggaggttgtcgcggatgagcttccggtgctccccttgatgctgagcaaaccggtgactgtctacaaccggaaggtcatcggccacaccgtcgatagtgccggtgttcagggcaattttgcgggcgtttggctgcgcggttaggtcgggcccgatactgcaattatctcggcgtgatggcatgcaacccgctggccggagcgcgcgctgcgcagctcaggagactgctgtttgcagagctccgttgctagcggacagcgtggttggaagcgacagcccttggtcgcgttgcgtgggtccggcaggtcgcctggcaggggtgctgcgtagcgccgccgggcggggtccgggacagcgtcgatcagcgcgcgggtgtagggatgcagcgggctcttccagatttgctcatggctgccggcttcgacgatgcgcccgagatacatcaccagcacccgatccgacagataacgcaccaccgagaggtcgtgggatatgaagagcagcgacagcttcaagtcgcgcttgatgtcggcgagcaggttgaggatctgggcttgcacggatagatccagcgcggacaccggctcgtcgcagatgatcaggtccggtcccaggaccagcgctcgtgcgattccgatgcgctgacgctggccgcccgaaaattcatgcggatagcgtgcaatcgcgtcctccggcaagccgacctgggacaggattgcactgacccgctggcgtcggtcggcgcgagagccgacgcgatggacgtcgagcggtgcgagcaggatatcgccgatggtctggcgtggattgagcgaggcgaacgggtcctggaacaccatctgcagcctgcgccggtaggcccgcagtcgctgctgcggcagcgtggtgagatccacgccgtcgaacgcgatacggccggccgacggttcaacgagccgcaggatcgtcttgccgagggtcgactttccgcagccggactctccaacgagaccgacagtctcgcccggcgcgatgtcgagcgatacgccatccaccgcgtggaccggggcggtaccgacgcgataggtggtcttgagatcagtaactgacagcagcgtcatggggcagaccgcgagatggttcggtgagatcgacgtggcaggcaacgcgccgtccaattgccgcgtcgcgttcgtgcgggacattggtccggcacagcgccaaccggtgcggacaccgcggtgcaaagggacaacctgcctgggtggtggcagaagcgatgttgccggggatttcggacagcctggcgcttcggtagtgcagcttctcgtgcaatcgcggggatgccgcgagaaggccctgcgtatagggatgcaggggacgctcgaacaagacgccaggcggcgcttcctcgacctttcgccccgcgtacatgacgacgacacggtcagcccattggcccaccaggccgagatcatgggtgatcagcaggagtgaaagcgacagttcgcgacgcaggcggtcgagcagttccagcacctgagcctggatggtcacgtcgagcgcagtggtcggctcgtccgcaatcaggatcttcggacggcacgccgccgcgatcgcgatcatgacgcgctggcgcatgccacccgacagtcggtgcggatggtcgtccaggcaccgctcagggttgggaatgcgcaccagatcgagcagttcagcggcttcacggcgcgcctgcgcctttgagaggccgcgatgcacttgcagaacctcggtgatctgccggccgatggtcagcaccgggttgagcgacgtcatcggttcctggaagatcattgcgatatcgcgaccgcgccggcggcgcatctcgatctccgggagcacgagcaactcgtcatcccggaggcgaacccgaccagagacaatacgcgcggtgccgggaagcaggcgcatcagcgccaacgccgtcagggattttcccgagccggattcgccgacgatggcaagcgtttccgctggagcgaggctgaagctgaggtttcgcaccggcgttgcgcttggaaaggcgatggtgagatcgcggacgtcgagcaggggtgccatcctatcgctccctgctgagacgtggattgagcacatccgtcagtccgtcgccgatcaggttcagtgaaagcacagtcagaacgataaccaggccaggcaatgcggtgagataccaggccgttctgatcaattcgcgcccggagccgatcatgctgccccagctcacgacattcgggtcccccagtccgaggaatgacagtgcggcttccatcaggattgcggttgcgaccatcaccgatgtggtgacgataatggccgggagagcattcggcaggatctcacgaatgacgatgcgggtgtcgctgaagccgagcgagcgcgccgccatgacgaattccttctcacgcagcacccgaaactcggcgcggaccagccgtgcgatggttggccatgtgacgagcccgatagcccaggttaccgttgctatcgagggctgcgcgatcgcgacgagtacgacgagcaggataaagctcggaacggtctggaacagctcgatgatccggaccaggatgtcgtcgacgaggccgcctcgataaccggcgacggcgcccactgcgatgccgatcgtaacaccaatcgtcgtggcgacaaagccgatcaggagcgaaattcgcgcgccatgcatgaggccggcggcgacgtcgcggcccagagagtcggttccaagagggtacccaagatcctgtccgggccacaacagcggtcgggccaccatcgagaggggatcgccgggataaagaagcggcgctagcacagccgcggcgatgatcaccagcaacagcgtagcgccggcgacgagagacggatttcgcctgatgcgaccgaacaattgcgatcgcgattggctcgcgtcggtagcgatcacatgcgtgtccggtgcgtgaacgttcggccattccgagcgctccggcgcagttcgtggccggtcatcagcggtccgttcggtcgaatgtgtggagtcgagggcggcgtcggtcatggtcagcgggtctcgatgcgagggtcgagccaggcctgcacgagatcaaccgtcatgttggcgatgatcacgagcagggaggagagcaggaggatcccgaggagcacgctgaagtcgcggctcatcacggcctcgaaggcgaggcggccgaggccgggccagctgtacacggtttcgaccaccactgcgccgcctagcaggccaccgaagtgcatgccggcgaccgtggtcaccggcaacaaggcgttgcgcagtacatggcgcaccgtgatcgtgagtggagagagccctttcgcagcggccgtgcgcacatagtcctgagcctgagcctccagcatggcggcgcgggcaagtcgggaatagattgcgatgtagaacagcgagagcgagagggcgggaagaaccatgtagcgggcacggtcgatcagcagatcgaagccgctgaggttcgcgccgatcgtggcagcgccgccgctcggcaaccagcccagcttgacggaaaacagcaggatcagcatcaggccgatccagaagcccggtatcgagtagagcagcgtgaccacgatcgagatcagacgatccggccatcggccggcgaatgtcgccatcacgatgccaagcgcgatgccgccggcaagggcgatgacgagcgcggttgccatcagggccaccgtgccgggcagtcgctgaccgatgatatcggcgaccggaagattgtagcgcggtgagtagccaaggctcaaatgggcgagattatcgaggtaagctgcaagctgcagcaggatcggctgatcgaggccgaaacggctgcgcagcgccgccaccgtttccatcgtcgccgatccggactcgccggcaaggacgtcggcggcatctcccggcgcgagctgcagcagaaaaaaattgatgacgacgattccgatcaccgtcgggatcgcctgccagatcgtccggcgaaaagtctttccaatgcgctggatgctcgacatgtttcttctaacttccatgacgtgtcgaaaagatgcatttgctcatgctgtcattcctcgcacggtcggcacgcggagatacgccacgacgagagaggagacgccgttgacaatgccgatgcgcgtcgccaacgtcgacgcattcgcgtgcgatcgtatcgatgttgcggatgctccacggacggcacgtatcaccacgacggacatgaatatgaccatagtgcacaagccgggcgacatcgttggctggccagtcttttcgagccccagccagtttccggaaagtcctttgtcgaaagcgctgcaacagccgctgctgcttggcttgttcctgccgatccaggctggtggctggagcgcgtcgaccctgtcgcgctcgacgacgtggacgttcgactacaatcgcgatctcacgctcagcgccgaacagttcggcttcgatctcgtgttcgcgctgtcgcagtggctgccgaagggcggctacggcggcgtctttacgggcgaagcgctcgattcgttcatcacgaccgcttcgcttgccgctgtcacgtcgcggatcatgctgatctcgacgatccacgtgctctacgggccgatccatcccctgcatctcgccaaatacggtgccacgctggatcatatttcgggagggcgctgggggatcaatgtcgtgaccggccaccgcgccatcgagcatgaggcattcggctggaaccagatcgagcatgaccgccgctacgagctggcggccgagttcatcgaggtgctgcagcggctgtggggcgacaaggagaacttctccttcaaaggacaatctccctggcgcctgagcaatgcgttcgtgacgcccaagccgcggttcggacggcctatccttgtcaacgccaccggatcggacgccggcatcgcgttcgcgggccgctattccgacatcgtgttcgttaccagcccggcgggctcgtcctttgcgagtgcgatcgaagccctgccggcgcatgtccagcgcgtgaagcagtccgctatcgacgtcggacgtgaagtgcggacgctgctcaatccgatggtcgtctgccgggaaaccgagcgcgagacctggcagtatcacgacgcgatcgtcgatcacatcgatcccgtcgccagcatgcagaactttgcgagcgatgcgcatgcctggaagggacgtgtcggtgtcgatgcgccgaagcgtcgcgccatcggtggcaatatcgaggtgatcgggacacccgagcaggtggtggagcagttcgtgcaactcaagaaggccgggatcgacggccttcagctcagcttcttcgatttcaagcctgatctcgatttcttcggccgccgcgtgctgccattgatggagcaggccgggctgcgccatgccgtgccgaagctcgagattggttgaccggttttccatgcgggtcaggcggaggcagctttaggcgtccgccccgctgcggacggccggaatctggcggcaggatgcgacgagggcaggcgtgcccgaccggttccgaacaccttttcccgcaacgtgcccggagcgtattcggtcttgtagacgccgcggcgctgcaattccggcacgacgagctcggcgaaatcccgatacccgcccggcgtcacggcgtagctgaggttgaagccgtcgatatcggtctcgttgacccaggcctgcagttcgtcggcgacctcggcgggtgagccaacgatgaccggaccgcggccgccgatgccgttgtgttcgatgatctcgcggatggtccaggggcgctcgctcctggagaaggaatcgatcatcgaagtgaccgcgttgtccttcttcacggtcggaaacgggtcgtccaggctatagcgggacaggtcgatcccggtccagcccgacagcaatgcgagcgagcccttggggtcaatatagcgctgatagtcgcggtatttggcttcggcggcgacacgggtctcggcgacaatcacggtcgtcagcgcatagaagcggatgtcgtgctcgtcgcggccgaatgcccgcgcgcgtgcccgcgtctcggcgacattggccgatgtgcgcgccttggagtgctccccaaggaaaaccgcttcggcatgccgggcggcgaaatccttgccgcgattggaggcgcctgcctggaacaggaatggcgtccgttgcggagaggggtgggcgagatggatggcgtcgaccttgaaatgcgcaccgtggtgatgaactttgcggatgtggtgcggatccgcgatcacgcccttgatggggtcgacgacaatggcctcgtcgtcccagctgccttcccaaagtgcatagaccgcatcgaggaattcgtcggcaagatcgtagcgggggtcgtgcggcatgatgttgtcgcgaccgaccgcacgtgacgccgcgttggagtagccggtcacgatgttccaggcgacgcgccccttggtcagatgatcgagggtcgagaagcggcgggcgagcgtgaagggcggctcatacgatacgggggccgtgacgccgatgccgagatgctcggtgacatgcgccatggccgagaccaacagcatcggatcgagcttcggaatctgtgccccgctgctcagcgccgcgtcggccgttccggcataaacgtcgtgaataccgatgccgtcggcgatgaagatcgagtcgaacttgccggcctcgagaatgcgcgccacgtccgtccagtaatcaagcgtatcgaagtccagcgagcggtcctccggatggcgccatagccccggagaaaggtgaaccgggctgaagatggcgaagccgttgacctggatttgcttgggcacgaggggctttctcagctactggaatgcggacggctcgggatggacgccagtcagaaaccagttcccgacattgcgggtcttgtattcggcgggattgtgcagcgtgtggatgcgtacattgcgccagaagcggtcatagccattggcaatggtggcggagcgtgcacccatcacctcgaagatgcggctggtgacatcaagcgcgacctcgccggcatgagcattggcgccggcaatcacgaccgcggcctcgccgcgctcctggggcgtcagatcgcggccgcgcgaccagacccgatcgagcgtcgcggccgcctcatccgcgagcagcgtagccgctttcacccgcgtataaagctcgccatagacccttctgacccagggatcatcggtgtgcttttcaacgcccgaatgaagccaggggcgggacgtttcccgcgtatagtcgcgcgcagtgatcagggcgccctgcgcactgccgatgaagacgttcagcagggtgctctgctgcaggaagggcgttacggtctgatagggacgcccgccgtcaggcttgtggtcgaatacctcgtttcgatgaatccggaccccggtgtaggtgacgcgcccgcttccggtttggcgctggccgaagccgtcccaatcgttctcgatccggataccgtcccggtttgccggaatggccgcgaagctccgtgcattggtatcgcggtcttcccaggcgacctgcaggtagtccgcgatatgcgatcctgacgtgaacgggcgaaacccgtccaatacaaacccatcggcatctcggcgaccgaacaggctcttcgagaagctgtttgcggtattgccccagaaccagttgccggcagcagaccgccggaagatatcagcagcttgctcggccgtgccgcgcagatgggcagcgtgctgggagccgaagtggtagccgtagaggtgtcccagggcaccgtccaccttggcaaactcacgggcgatcttcagcgcggtcgaccagcgttcgccggcaccgccgaattccgtcggtatcaacaggttgagaaggccgctctccttcagcaaggccaactgctcgagcggtttgccgccggcacggtcgcgctcggcggcgtcgcgcgcgaagatctcgcgcaaccgcacggccttggcaaaatggggatttgatgtatcgagatcgaaactcatgaggatatcccgtgcgagatcagctttgcagccagacgtcggcaaagttggcggacggcccgtcgatcgtcgtggtgtgatcgcggaccttgcggttgacgatggtcaggtttggtcccgtcaccagattgatgtcgggcaggtcggtcgcgacgatgacctggaaggcatagaacagctcacggcgctttgccggatcgctttcgacggcggccgcctccagcagccggtcgacctcagggttgctgtagcccgatccgtttgagaagggcacgccgggcttgaagttcttcgaccagtacagccgctgcacgccgaccgtcggatcgaacgaatggctcatgccgttgctcatgaagtcgaagtcgcggtttgtgtaggtccgcttgaaccaggtcggaacgtcttgcgcgcgcagcgtcacgccgatgccgatcgtggaaagcgcctggcgcgtgtaggcgccaagttgctgataggtctcgccatacggcatgtagtcgtggaaaaccttgaagcgcgtaccgtccggcccgcgcggcaagcctgcggcatcgagcaacgcttcggccttcttcggcgcgaattcgtagcgcggaatcccgggattgtggaattgcttcagcgccgggctgatcgcggctggtgcgctctgtgtccatccgtagaaaacgatgcggttgatcgcgtcgcggtccaccgcgtgcgcgacggcacgccggacctccggcttggcgaagtaggggttggcgaggttgaactcgagccggtacacgatgggctgatagtcatagccgtgtgtttcgatcaggaggtttgggttggccttgagcgtctcgatctgcccgagcggcaccggcgtatcaggcgcgtagtggatctctccggtctcgagcgcaaccgcgcgggcgttggcgtcggcgatgaagcggatgacgatgcggtcgagatagggtttgcccggatcccagtagttgggattgcgctccagcacgatgtggctgccctgtttccattccttgaaaacgaagggaccagttccaatcggcgcgcgtccgttgggattggccaggggatcggtcccctcatagatgtgtcgcggcacgatcggcgattctgaggccgtgagggcggcgagcaggtatggtgcgggcttgtcgagcacgatttccgcaacgtgcggatcgggcgtgcgcacctcgcgaaccgaggcgagcgtgccgcggccgcgcggatgatgctgcttgagaagctcgatggagtgcgcgacgtctgccgacgtgaagtcgcggccgtcatgccactttactccgcgccggagctcgaaccgatagctgagcccgtcttcgctcttctgccagctggtcgcaagctggggacggggattgaagtccagatcgaaggtgacgagcccctcggtcacctttccgctcacgcgggtggtcgggcccgcggtgtgcgtcaggctgacgaggatgggaggttcgggctgaatcaccacgttcagcgttccgccatgctttccttcatcagcggcgcgcactggccccgccactgagctgctcacaagagcgccagagctccacagcagagcttttgtaatttgccggcgcgtaagccagttcattgccgatcgcacgtcagttgtgaacaccgcgtcgcaataattcacctcgaggtcagacaatcaatcctgcggagcgcttctgcgcataatgaaaattttgctgctgcatgcgtggcacgtcgcgctcatgaacgcgcgccggtgctgtgaacaacaaaagcaaattctctgcgaaacgtgatcaagattgaggcggtacgacttgcgcggcggatccggcgagatgctctctccgtgcgtcgcggcttgacgcggaggcgcgatgtcgctggatcgacggacctttaatcgcgggcttctggcctccggcgccgccggcctgctcggtccatcacgagcgatggctgccgaggcgaaacccgtgcccggcggcaccttgaattgggtgtactaccccgacccttccgcgatcatcgcgatcaacacgtcgtcgggaaccgggcagacgatcggcaccaagatcaacgaagggctccttgcgtacgactacgatctcaatccgaggccggtgctggcgacggcctggaccatcagcgacgatggcaggcgctacacgttccggctgagaccgaacgtgaaatggtctgatggaagggagttcacgtcggccgacgtcgcattttccatcgagcggctgaaggtcgctcatccgcgcggacgcatcacgttcgcgaatgtcgaggcggtcgaaacgccggaccgtctgacggccgtgatcgtgctgtcaaaaccggcccccttcctgatttcagcactggccggtgccgaatctccgatcgtgcccaagcacatctacgaggctctcaagcccgaggagcagccccggctcgagcagacgatcgggaccggtccgttccttctcagggaatgggttcccggcagtcatcttctgttcgttcgtaatccgaactattgggatgccccgaagccttatgtcgaccgtctggtgctgaaggtcgtgctggatccggccgcgcgtgccgcggcgcttgaggcgggagaggtcgatatcggggcgacgccggtgccatatggcgatatcgagcgtttcaagctcgacaagcggttcgtggtcgataccacgacctacgcctattcgggcccacagcagcagctgttcttcaatttcgatacgcagatcctgcaggatcgccgagtccgcaaggcgatcgcccatgcaattgatcaccgggctttggtcaacgtcgtgttcttcggctacggcctgatctctccgtcgccggtcagcacggccctgcccaagttctacgatccgaagatccaggcgtggtcgtttgatccgaaggcgggagatcaattgctggatgaggccggcctcaagcgaggcgcgggcggcatcagggctaagctcaggctcacgcaaaatccattcctgcccgcgagcttcgccgacttcctgcgcaattccctgcgccgaattggcctggacatcgagattctgcggtacgatctcgcaacctacctgaatgtcgtctatcgggatcgggcatttgacctgacgatcgaaagcctctccaacacgttcgatccgacgctcggcgtgcaacgcgcttactggtcgaagaatttccgcatcggcctgccgttctcgaacgcggcgcattacagcaatcccgaggtcgaccagcttctggaggcggctgcgatcgagccggatgccgagaagcggcgcgcgatctggtccaagttccaatcgatcgtccacgaggaggtggcctccgtcgacatcgtcgcggcgggcggcgtgatcattgccaacaggaaggttcgaaacttcgctcccggcgccgagggattgaacggcagcttcgccgatctctggatcgacccgtccgtataggccgtgacatcacattcttttcctttcgcctgcctgcgcagaagaaaaatagcgcattgcgcgtcaagaataaaaatctgtgagattgcgcagggcgatcatggatcgtcatactctgacgatgaggccgggcgggtgatggtgcggcgaggaacgtgttgatgatcgcaaaacgcaaactcttcagtctcctgcttgcagggatcggtctactgttcggttcgagctcggggcttgccgccgaaccgctcacggtgcggatcggatttgcttccgtcggtgccgacaatcgccagttctccggcggctcgtccgcggcggttgcccattccgagcattatctcgatcaggcgttgcatgaccggccggacgtgaaggtcgaatggtatttcttcaagggagcgggccccgccgtcaatgaggctttcgccaacaaccagctcgacttcgcaatccagggtgatctgcccgagatcatcggccgtgcaaatggtctaaagaccaggatattgctcgcatccggtgcccatgcgccgatctatcttgcggttccattcggctcggcgatccgcaaggtcgccgatctccgtggccgcaaggtctctattttccgcggaaccaacaatcatctcgccgccgtcaaggtgttggccgggaacggtctccaggagcgggacgttcagatcatcaatatggatacggcgaccacgaatgcggcgctgacttcaaaggatatcgacgctgcgttcggcaacttcccgctggccagcctcgccgagaagaatatcgcggagatcatctacaccaccaaaggcgacaatccggcctatgaacggcattcgacgctgatcgggcaggacgctttcatcaaggcgcatcccgacatcacgcagaagatcgtctcggcgatcgtccgtgctgcgcgctgggcgtcggacgaagccaaccgggaggcgttctttgagatatcggcccgaacaggcttcccggcgtcaggatatcgctttgacttctccaaccaggagctgaaatatcgcaacaccccgatcatcgatgcatcgatcatcgagagctatcgcgtgcaggccaggcaggcgagggagttcggtctgcttcgccgcgacgtcgacctcaatggctggttcgaccgctcattcctggatattgcgctcaaggagcagggtcttgtcggctactggcaggaatatgatgcgagcggaaggccgcaggcggcgggacaatgaacgtcgccgtgcaactgcggacaacggcattccctgaccagggacaggggcggctggaggtgcgcaacgtctccaagtcgtttgtcgtgaatggcgcgcccgttgaggcgctgcgggacgtgtcgctcgacgtggcagccggcgagttcgtcgttctgctggggccgagcggctgcgggaagtcgacgctgttgcggctgatcgccgggctcgagccggaatttcgtggcagcatcaaccaggatggcaatgcgatcgcggggacgagcctggatcgcggcatcgtcttccaggagccgcgactgttcccctgggcgacggtttcccagaacatcgccctcggtctcaagaatgcgccgctcagcgagcgggccaaacgggaggccgttgccgcgcatatcacgttggtcggacttgatggattcgcgcaagcatatccgcaccagctctccggtggcatggcccagcgtgcggcgattgcgcggggcctcgtcaatcgcccccggctgctgctgctggacgagccctttggtgcgctcgacgcgctgacgcgggcacggctccaggtcgagctacagcgaatctgggcgcacgagaggatcacgatggtcctggtcacccatgatgtcgacgaggcggtactgctcggcgaccgagtcatcgtgctcgcgccccggcccggtcgtgtgtcgcggattttcgcgatttccatgccgaggccgaggtcgcgaaccgatgatgatctggtccgaattcgaaatgatgtattgcgcgcgctcggcgatggtgaagaggacggcgcccggggcgcgccgatcggcgacccggcatgagtgatgcagctcttcgcacgacacttgagcctcgcaccaccgcggcggcgggttttcgacgtatctccggtcgcgtcagtgaagtggtgcctcgtcagctcgtgaagcttggctggttgctcatcctgccggccatcaccctcccgatctggatcgtcggcaccgaccgtggctggcttccggagcagatcctgccgcgccccggcgatgtgttgcacacgttgcgggacatgatcgcaagcggcgagcttgcccagcatgcgggctacagtttacggcgcgtcgcgttgggcttcgcgatcggtgcggctgctggcctggtcgtcggctccgccatggggctgtcgcggcgcgtagacgattatgtccgtccgctgttcacggcgatcgcccaagtgccggcgctggcctggattccactcgcgatgctgctgctcggcatcggggaggggctcaagatcgtcgtgatcgcgaaggcggcatttgtgccagtggtcatgaacaccagcgcgggcattgcgaacgtgcctagggcgttcgtcgaggtgggagaaacattccgcttcacgcccctgcagatgctgcgccatgtcgtcctcccgggagcgataccgccgatcttcacgggcctgcgctacgggttgacccacgcctggattgcgctggtcagcgtcgagctgctggcctcgtcggagggactcggctacctcctggtctggggccgtcagatgttctggctcgataccgtgctggtcgccatgatcgtgatcggcgtgatcggctttgtgagcgacaagatcctcgccgtgatcgaaaccggcctgcaacgctggcggattgacggtgtccagtagcgccgctctcggatcactcggtcgcgggctggtcttgccgatcggcctgctgctcacctgggaggtcgccagccattcgggcctggtcaaccgccagttcctgccgccgctcgagcatgtgggcgccaccgcgtggcaggagttggcgagcggtgagctccttgaagcgcttgccgccagcctgcgccgtgatctcctcggatttgtgttcggctccggcgccggggtgttgatcgggctgttgctcggcctctccacaatcgcggaccgcgtcgtcatgacctggttcaatgggctgaagcagatcgcgctcctggcatggattcccctgatctcgctctggttcgggttcgatgagatggccaagatcgtcttcatcgggctcgcggcggcgatccccgtcattctcaacctggtcgagggtattcacgcaacatcccgcaagctcgtcgaagtgggtgaggtgtttcgcttcaaccgcgtgcaattcatcctttatgtctatcttccagcggcgatgccgtcgctgctgaccgggctgcatcttgcgttgatctatgcatggctcgcgaccatcggtgccgaatacttcatggctgccggccctggcatcggcggcctcattattgccggccgcgaacgcttcgacatggatctcgtgatgctcggaattctcgtcgtcggctcggttggttttctggtcgatcgtggcgcgagttggctggagcggcggttgataccttggcgagctgcgtcggcgcgagcctgagctacgatcatcaagtccaaaggaacccggccaagctcaccaacgtgtcctcgagaagtacgcattcggcgctcttgtcgaaagctgaggagttttcatgtgtcggctcttcgtcctcgtcggcgcgtactcgcccggtagcgccaggtaactgtggtcaaaaatcctgggaactgccgagaaaattatacacgtgtcgatgcccggtccatggcaacgcaacccaactttattgcgcactttggaataggctgaactgcaatctttgggtcgagtttaaatggcggctcacgtatcgccgttggttccgcgcctccttcctgaactcgagcgtacccttcggccccggtccccagactggggccgtaccttttgtggctaacgagagttgttgccgcgagctgaaagccggcaagacggcaacgctttttttctgatcaccgatgccggatcggcgcgggttttgatgtttgaaaatccggtagatatcaacgtggcgccgctgccattccaaaattcggctgcaaggggcaacatttcgcctgctgtaccgagtgatcgcaggcaaatcctgcagagagctcgcgcggacagtcgcttcatcgcggcaaggaggccaaagtcgggaatcctgtttcctggttcgcggcttgagcaggcgatgtattctcgcgagcaacgcgcgactaaggaatgccggctctgcaatgcaacgccactttgatcgttcgatcattcggtaaatcattccgttgacccgatccgaagcgggcgacaaggtcgctgtccgtcttcggatgcgcgcagtcatgctttccgcgcccctggaatcccccgtcctgcttggccgaaatggaaattcgatgtcgtcgcttgagcttgaacacgttcggagtgatcgggtcacgagcgggatttcggcaattcgcccacccggtgaccggcctcaccccgtcgtcaacgagccggacaccgtgtcctggttcgagcgtcacgatgggcccaccttccttgtggccggaggcgtttacggcagctggctgctcctacttctgctgcaccgccaggtcccctggtacgtcatggcgccggtcgccggttatgtcattcaatggcatttctcattgcagcacgaagcgatccacggcatgcggggcgtgccgaaatggctccgccgagcactggtctggcccccgatcgggatctggtttccgttcgagttatatcggcgtctgcactcgcagcaccatcgcaacggctatctcacctatcctggtgaggacaccgaatcgtactatcacgatgcggaggattgggaagacttcggcgatctctcccggtggctgctgacgatcaaccagaccttcctcggccggatctgcatcggtccgatcttgtgcacgccaaggcttttcatcaaggagatggcgaggctggtcgccggcgagaccgccaacgccggcatctggtgccggcatctgatcggcgtcgtgctcgtgctgctggtggtcgaagccttcggcgtgagcgttctgcagtatctggcggtgtttgtttatcccggcctgatgttcggcatgatgcgcggctttgtcgagcatcggtggggtgagcggcccgaggagcgaaccgcggtcgtcgagtcgaattggattttcggcatgctgtttctgtggaacaacctccacgccgtccaccatacttttccgacactccagtggtggaaggtgccccgggtgtggcggcagcatcgcgaatacatcaaggcacgtaacggaggattcgtattccggggttacggcgagatcgcgcggcgctggctggtcaagcccgtattcgttccggttcacccgcatcgcttcgcgccaggctcggttcgtcaccccgacgcatcgatgcgccagccccccgcaacgttttgaggtccaccggtatgcgcggccgcactgaaccggagacactgagctgggctggtcgcgtcctgaatctgccgatgtacgagcttcccgagatggcggccgccaatggcgcgttcctggccgagctggagcatcggctcgatagcaagggagtgagggcggccggccgcattgctggcgaggcggcggacactcaaccgcatgttctcttcacgcaggtctgcggctatccgctgttgaagtatcatggcgatgaataccgcgtcctggcgaccccgcattatgcaatgcccggatgcgcaggctcgcatcaccgtgccttcgtcatggttcgcgccgacgacgccgccgcatcgctcgcggacctgcgcgggcgagtattcggctgcaacagcctgttctcgaataccggaatgaacctcccccgtctgtcgtttgcgcggatcgccggcggcaagccgttcttttcctctgtcctagtgacgggggctcatgtcgcaagtcttcaaaggctcgacgaggccacgatcgacgcctgttcgatcgacagcgtgacgtgggggtattttcgacagtttcggcctatggccgccaaacgataccggatcctcgcagagacgctgccgagcccgtcgttgccgttcgtgacgtcggcggtcacaaccgaggctgatgccgcggtgctcgcagagacgctgcgcgagatgacgcgtgatccggggctcggccatatccgtgagccgctgcatctgaccgacgtctccgcgccggacctggccgcttacgggcgactgatcgcgtacgaggcggaagcggcagagctgggttaccccgaattggcctagagctcaccgttttcatgagtgagcgtcaacccgatcgaaccaccatcaacgaaccgttcggcgcgaggcgcaagtcatttgttaaaggcgcctttttcgaagcattcatctacgtgtggcgcggaatttgacatggacagccggttggaccgctctacgatcgttggttactgcaattcgtcatttttcagagagaggcgcacaggtcgcctcacgatagaccgttgtcgattgatccggaggccgtggtgggaggctcccaaacttgggtgaatgttggcgcagtggtggccgccctcgcgggcctgtcggccattgtgaccgtcaatcttccggaaaaggacgaccgccaaatcgtgaatgtctcctatgatccgactcgcgaactgtaccaggccatcaatcccctgttcgacgccgcctatgcccgggagacgagacgccatttacgtgtggtgcaatcgcatggcggatcttcgcgtcaggcgcacaaggtggccaatggcgagcagccggccgacgtcgtgacgctggggttggcctctgatatcgagacgttgcgcaagcggggccttgtcgagccgggttgggttgatcagtttcccaatcatgcggtgccctatacgtcgaccatcgtcttcgtcgtcaggcacggtaatccacatcaaatcagggactggccggatctgctcgccccacagctggaagtcgtgatgcccaaccctcggacgtcggggaacggcaagctcgcgtcgctggcggcctgggctgcgaccgtcacacgaggcgggacgcaggacgatgcggtcgctttcctccgtgcacttttccgacaggtccctgtgttcgacgagggcgcgcggggtgcagcgttgcgctttgcgaatccagatggcggcgacgtgcatctcacctgggaaaacgaggcgatccgcgaggtcgcggcttcaaacggtgctctcgagatcgtctatcccccggtcagcattctcgccgaaccgtccgttgccgtgataagcaacgatacggtgcgcaaggcaagtctcgccgacgcccgggcctatctgtcgttcctgttcagcgatgccgggcaggagacgatcgcacggctcggataccggccctacaagacagagatcgcgcagaagatcggcgtggtcttcccctccatcaagctcataccagtcagttccattggcaaggactggagcgacctgcaggacaggttcttcgcggaagacggcgtcgtggaagccgcctttgcattgcggaacaaatgatgggcgggatcagctacagcccgcagacgttgcgacgcgacgtgatcgccggcctcaccgtcgccgcgatctcactgccgcaagcaatggcttatgcgcttctggcgggcgttgacccccgttatggcctttattccgcgatcctgatcacagctgtcgcctcggtatttggatcgtcgtcgcacctcatcaacggtccgaccagtgcaatctcgctggtcgtgttcagcgcgctctcgatcttcgacgccgatcaaaggatcgaggcagcagaggccatgttcctgcttgcagccttggtcggcacgatccagatcgctatcgccgttttgcggctcggggatctcacgcgctacatttcggaatcggtcatcctcggtttcatgagcgccgccgcgctgctgctggccttgggccagatcagcaatgcgctgggcgtacgcgacaaggggacgggtgcccagcacatcttgtctcggctctggttgacgctcgcgaccggcgataccattaacatgaaggccgtcgttgtaacgctggtgacgctcgtgctggcggtgtcgcttcggcatgtcgtgcggcgcaatcgatggccgcagttcgacatgctggccgttctggtgatcgtcgcgaccggagcctattttgccggctggaccgtgcccggtggcgatggcaagacggcaatcggaatcgccggcgcggtgccggccgacctgccatccttccatattccgaaagtgcagttgaggtgggcgctcgatcttttctccgacagcgtggcgatcgcgttcctggggctgctggaggcgctggccatcgccaagtcgatcgcccatcagacgcgacagccgttggacttcaaccggcagtgtcttgccgagggacttgccaatctgtcgggaggtttttttcagtgcctgcccggatcaggttcgctgtctcgctcggcgatcaatttccaggcgggagccgcgacgcgcttttcgggtatgttgaccgcgacgttcgttgcgatcgccgtcatcgcattcgcgccgcttgcgcgctacgtgccgaagcctgcgctcgccgcgctcttgttgttgaccgcgtcgcgcctggttgacttcaagcgcatctcgtacgccttgcgcgcgtcgcgtgtggatgccggcgtcatcgtgataactgccttgtcggcgatagcattcggtctcgatctcgcgatcatcatcggcgtcgtgctgtcgatcgcgttattcgtgccgcgcgcagcgaagatcagggccgcagagctcgttgtcgacgaggacgatgtggtgcgggagcggttgccatccgagccttcaaatcgcgggtttctgttctacgatctcgaaggcgaactgttcttcggcgccggcccggaattgcacaaggtgctcgatctgatcctgcaccaagcctcgggcgaaaaagccaggcacatcttgttgcgtctcaagcgcgtgcgcaatccggatgtcgtcagcctcgaacatctcgagcaatttctcaaggaatcgcgcaacgccggcatcgaggtctggctcgccggtcttcgtcccgatttgctggcggcattcgaccgcctgggcttcgcagactggatcaagcccgatcacatctttgcgcagggcgcggacgaggactcggccacattggcggccgtgaggcagatcaggtcagagctgcaagagcaggcggcgaacgtccgatcgcgcttgtattatcgcgtatgatcgcggttgatcgctgcgaacgtctcagggctgcgttatcgttcgtggatccatccgacgttgcaaggatgccgccgtttgaagcgctcgcgaaacacgattccttctatcgtcgcagtcaactttggtttgacgttttattgcgcatagaaacgtttttcctcaatatccgagcgttcctcgacggtgcaaggaggtctctacaatgaatctggcgacgcttgcgggtcgtgctcttcgtgcctttgccctgtcgcgaacgtgggggcgcgcggccgcgcttgctgtttccgccgccgcactcgtcgcggccccggcgttctccgcgacggctttacagaacatcgcggttcgttcgcggtgcagcgggcgcacggtctgatgggcaagacctatctcggggtacgaggtgagcaacatgagcaaggatcagctattccttctgaagccgggattcgaagacccggcgcaggccggcaagttcttcgtctgtccgcactgcaatgcgatcgaaggtctcctcgcatcatttccgggtctggccacgcagatcgaggttcagcgcttgccgttcgcgcgaccgcgaggtccgatcgtcgaaattctcggtgatttgcatcaatcgttgcccgtgctggttttcgaccaaagtgggccggtgcccgaggacgctggtgttgtcaacggccggcggttcatcgattcgtcagagcgcatccttcgatatctggccgaacgttactcctttccatatatccatcagtgaagcggggcgaggcgcgctcggcctcgaatgtggcgcaccgccttcacaccgctgaccgccagtcgatccactgcgttatcgccgatttggtggggaccccggttacgccgggcgctgatgttgcggcggcgtatctgaccggcgccgcggcgacattttcggcgacgataagcaacgctgttttcattgctcgtcgcaaagcgacatgaactctctctgtttgaagcaaactttgcgatcgacgcaatcggatgccggacctagcatttcggacaggatgtcgtgccttgatgagcgctctgttgaacacgacaggtgctctgtgccgcgcaggcaggctgggcatatgcgactacagtgcaaagcaggaatgcgcatcatgacgatagaccaacatcagccattctcgccgtcgcggcgtgcccttctcggtctcgccggcctggcgggcatcgccgcgccattcggcgtcatgggcgccgcgcgcgcctttccggcgttgggtcttggtccggcggctgatcccctgagcgcagcgccgatctgtcgggtagcgaattccgacgaggccccgaaggggccggctcgtcacatccgctttgcctacaatggcacgggcatctgcacggcggcggtgcccgtcgccctgcaccgaggccatttcgcacgtcacaatctggatgtggagttcctgcagctcgcaggcagcaccgaccagatgttgcagtcgctggcgaccgacaaggcagatgccggctcgagcatgctgctcaactggctgaagccgctggaacagggcatcgatgtcaagctgaccaccggcctgcatggcggctgcacccggctgttcgtgcgcaaggagtccggattcaaggatatcaccgatctcaagggcaagacgatcggcgtctccagcatttccgggcctccgcgcaacttcttcgccattctgctgtcggacaacgggctcgatccgcagagcgatgtgcaatggcgggaatttccggccgatctgcagctcaccgccctgcagcgcggcgagatacaggcgatcgccgactccgacccgaatgcctggttgacggagcggcgcgccaatggcgatctcgtcgagatcgcatcgaacctgagcggggattacgccaacctgtcgtgctgcacgctcggcgtgcggagttcgctctgggcgtcggatcccgctgcggtgaaggcgctaaccctcgccgtccgcgaagctgcgcatcacgtggccgaacatccagatgacgctgccgagatattttccaagtacaccccgaaggtagcggtcgccgatctggcgacgatgctgcgcagccacacgcacggccatcatccggcaggtgcagacctgcgtcgcgaggtcgtgaagatcacgagcgatctgaaacgtgccacgatcatcaagccgaatacggatccggccaagcttgccaatcgcgtcgtggtcgacattgacgtctaggcaatttcccggaggatcgcgttgatgagcaacacgagaagcaaggccgcctcgactgtggtgcccggcccgtcggggattgatgatgccgcttcggcggcgttgcactcccgttacggcaaggatttgcctctgatcggcgaggcttggaacggggtgctcgacaatctccttgcccaccgttctgtgcgagcctatcggccggatccggtgccgcgcggtaccgtggagacgctggttgcggcagcgcagtcggcctcatcgtcctccaacctccagacctggagtgtcgtggtggtcgaggatgaggcgcgcaaggcgcgcctcgccgagttcgccggcgggcagaagcatatcgtcgaggcgccgcttttcctggtttggctcgcggatttgtcgcgggcagagcgcctggcaaggagtgcgaaccatcccaaggatggactgcccttcctcgagacgttcatcgtggccgtggtcgacgcggcgttggccgcccagaacgcggtcgttgctgcggaggcgcttgggctcggatcggtctatatcggcgccatccgcaacaagccgcaggcggtagccgaggaattgcgattgccgccgcaggccgctgcggtgttcgggctgtgcatcggctatcccgatccgacgcggcccgcccgggtcaagccgcgcctgcgccaggacgtcgtcatccatcgcgagcgctacacgacggctgacgatgatgccggaatcgccgcctacgacgccaccttgcgcgattttcagaccgccgagggattgcctgcgatcggctggacccaagccgtgctcaaccggcttggatcggtccggtcgctgaatggacgggaccgcctggtcgaggagctgcggggcctgggctttccactcaaatgaggtgcaagtcgcgcatgcggcctggagtgcgatgagggtcttgctttaggttcgctcctgtccccagcgctgcacggtgatccgtgtcaggctccggaacacaacgctctccacgaggaggccgatcaggatcacggtgagcagtccggcaaagacgcttgcggtctccaattgggcgcggctggtgtagatgaaccagccaattccgccggagcgcgcgctgacgccgaagaccagctcggctgcaatcagcgtacgccacgcgaacgcccagccgatccgcaagcctgacaatatctggggaaatgccgccggtaccaaaatctcggcaacgaaacggccgcccgacaagccgaggttacggccggccatcagcagcgttggtgggatggcgcgaaagccggcatggcaggccagcgcaaccggccacaggaccgagtggacaatcacgaaaacgaggctcggcgtgccaacgccgaaccacagcagcgcaattggaagcagcgcgatcgccggaagcggattgaacatcgaggtcagcaggccaagggcctcattgccccagcgcgacaacgtcgccagtgccgtaaacaccgcggcgacgccgacgcccagtgcatagcctgtgaccagaacgcgcagcgaggtgagcgtccgatttggcaactcgcccgacaggatcgccgaccagagtgccgacagcgtcgcccccagggtcgggagcagcagtgcgttgtcaagccagcgcgcgtagagttcccaggcgagcgcaagggcggcaaggatcacaaagcgccgccagggcgtttgctcgatcgcgcggcgcagtgccggtgcgtgaggaagcttcggggccgtgacctcagccatgatcgatttccggatcggcaaagacggcttgctgaatccgctgttccagcccggtgaatcccgccgtgccgcggatacggctttccggcgggacatcaaatgtcgcggccagccgaccagggtggggtgtgagggcgaggatgcgggtcccgacccggatcgcctcgtcgatgccgtgcgtcacaaacaatgccgtactgccggtctcttcgcatagcttgagcaactcgtcctgcatctgacgccgcgtcagggcatccagcgcggcgaaaggttcatccatcagcagcagcgccggctccagtgcgaaggcgcgcgcgattgcgacgcgctgcttcatgccgccagacagagtgtgcggaaaagtatcgacgaatttgcttaacccaacccgttcgagccagccccgagcaacggtctcggcctcgcggcgcggcagcgacttgccgcgctccagggcatagcggacgttgcccagcacggtgcgccacggcagcagctggtcaaattcctgaaacaccgtcatccgctcggggcccggcgctccgatcggccgcccatccatccgaatctctccagagctcggcttgagaaagccgccgactgctcggagcagcgtggacttgccgcagccggacggacccagcagaacaagccgctcgcctgccgaaagagcgaagctgacatcttcgactgcagtcaggatgccgtcgcgcgtcggatagctgatgctgacgcggtcaagcgtgagcaaggacggagacgcggcatcgccgacaaggtcgaccggtcggggagcgaggttcatgtcagcttcccggcttgtctccgagcccggaccagaacaagtcccgccacgacgccggcgcctgcttgatcaagccgaccttggcctcgaaatctgcgaacttctgcgcgccttccggagcggttgtgaagttgacgtccttgtcgcggatgatgctttcgacgaagtcgggagcgagcttagagccttcggccttgatatagagcgcggccgcgtctttcggattggccttgatccattcattggcgcgatcgagaccgcgaacgaaagcctgaatcgtcttcggattgtcgttgacgaacttcgtggtggagtaaaccacgttgaaggtgtgcggaccgccgagaacatcgtagctgttgaggacctgatgcaccttgccgcttgccagctgctgctgcgaaaacggcggtgaggtgaagtgtgctgtgatctcggaacgtcccgacaggatttgggccgtggcgtccggatgcggcatgctgacggtgagttcgtcgagcttgtcgtatttgccgaaagccttgtcggcggccatctggagaacgatcggctggaagccgaccttgaccgacgggagcgcaatccggtctttctcggtgaagtccgcaatcgtcttgatgctcggattgttggtggtcaggatgttggccattgagcccagggcggccacgccgatgatcttggcggttgtgcgcgtcttgtcccaggtcaggatcatcggcgtgatacccgccgtcgcgaaatcaagcccgccggaaataagtgcctcgttcatcgccgctgcaccggacagccgaagccattcgatcttcggcggcgcgatgccgagtgctttcgcttcctgctcgatcagtcccttttcgctggcgacaatgagcggaagataggcaatcccgaattgctgcgcgatgcgaagttgatcggtttccgcgcggacgccattggcgccgcttgcgagcgcgatcaacgcgagggcggcagcacgtagaagcatcgatgtattcattctgtggtcttctgagttccagttggtccaagcggcacgtcgcgcttttgcaggcccttttggccacacttcaggaaatgctgcaattggtccaatggattggaccaattgcggtacctccaggatttcttcgttgaaatgccaacgggcgagattgttgttctccaattcgtctgcaatggagaaatcggttctttgtgtggggtggcgccctttgatgacggtgtccaagtcgcgggcggcgtggtcggaacgtcgcaatcaaaggtctcctgccccatcggcgttcgccggctcaattgccagtgtgccggttgcagcgcgtttcgagcgaaaggagccggttgctattggaagcgcggacgcgagaagtctttgctacctgatcgaactttacagagcgcgtgttgttttgttcgacaacagcttgtcgggagccggggtccaactaggatatcgaggacggcaatcgaacgcgggcacagcaggtgacagaagccttgaattcagcgcggatcattgatctggacgcctatcgatcaatgcggcggaggcagcagccggcgacatccgccggacagtggcaaaacgccaccttcggtccttcctttggcgcgatgcagcttttctggctctggcccgcctgggtgtgggtgccgatggcggtaccggcgacatccgctgcgcactgggatgctttatgagcgacggtaacgtcgcttcttcattagacgccaacccgtcacccgacgcggagcaggatctgcctgcggtcctcggacgcaatctgcgacggctgcgaacgagccgcggccactcgctggaacggttggcgaagcagtccggcgtcagccgtgcgatgcttggacagatcgagaccggaaagagcgttccgaccatcgcgctgctgtggaaggtcgcgaacgcactgcacgttccgttcgccaatctgttgcaggcggatgtcgcgcgaggcccggtcgtgctccgccaaagtgacgccaagctgctctcatcgagccaagggcagttcacgtctcgcgcgctgtttccgttcgatggcagccatcaggtcgaattctacgagctcagaataggtccgctgcatcgcgagaacgccgaagcgcatgcgcccggcacccgtgaaaacctgttcgtggcgaagggcgtcgtggagatcgctgccggctccgacaagccgcagacattgacggaaggcgacgcgatcgtcttcgaggccgatgttccgcatgtatataagaatctggtagccagcgaggcagtgctctacctcgtcatgacctatgccgacgacgcgacctgaaacgaaaagagggccggcagtgccggccccctgggaaggcagcgcgagccggtcgaggtcctaggccttcatcggcatgcacatcatcatcatgccgccgcagcccatcatcatgggcatgcccatctgcatcatgttcatcatgctctcgcagcacttcatgaacatgtccttcattgccggatccatcggcatcatctcgcaggtcatgccggtgggggtcatggtgcacttcatctgacaggccatcatcggcatgcccatcatgggcatgttcatcatcggcatcatgccgccggccatagaggggttcatcatgccgcccatcatcattggcatgggcatcatctgcatcgcggtgttcatcgtcgttctccaggggtagagcagggcgtgctcaatttcgtcactgtcgtagatagagtgcggtgcgatactggagaatagggaaagtttcatctcattcgctttcgtctgagaaaatggaagcggagcgagatgctgcggcgagacttccaatataacagatttccatccggcaaattggaggtgcttggactgagccggatgccgcgacgcggttgaagtcatccacgccgatagtctgattctgtcgagaacgcggtcgattcgccgcgaggctgcagatcacggcatgtgatgctctttctcgtcccggcgtggttcagtgcagacgccatccacgttgcgtgcgatcgcggatgaaactcagagaggcgatttcatttgcatcgtctcgacgcgttacccggttgttgcagagccttaggcatctttgaaaagactatcttgccgccggcgcctagcatgtcacgagtttgcaatcatgagtgcacgccatgaacacgcctcgtatcgacagcggtcgcgcctccaccggcgtgcgttcgccgatcatcatcaaccagcttggagccgaagttcgcgcgtcgctgatcgaccactggtcccgcccgctgatcattgaccatcccgccgagcgtccggcctgggacatcgcgccggaagccgacgtgttgctgacccgtccggccgcaggctggagcaaggcgccgggggagaagccgagggggtggccatacggcctgcgctggatccagaccgcgtcgacgggcgtcgacttctttccggaatggctgctcgatggtccggtggttacggttgggcgcggcatctcggccgatgctatttctgaatatgtcctggcagcgatcctgggctttgccaaacggctccaagacgtgcgtccacgcagtcgagcggagtggaagatcacgccgctcggttcgcttgccggaaaaacggttggaatcgcgggatttggcgcgatcggccatgccgtcgccgagcggttgaagccgttcggtgttcagatcaaggtgttgcgacgctcatcgtggcaatatgccgttccgggtatcctcccggtcgacagcatcgaagcgctggtggcggcctccgaccatctcgtgatcgcactgccggcaacgccgcagacagtgcatttgatcaacgccgaggtcctgacgcatgcgaaggaatcgttgcacgtgatcaacgtggcgcggggccggatcatcgatcagcaagccttgctgcgtgcgctcgacaacgggcaactggcgggcgccacgctcgatgtcacggatccggagccgccgccggagggggatccgatctaccttcacccgaaggtcgtcctgaccccgcacgtgtcctggaccggagcagacgatatcaagcggctgaccgacaagacgctggtcaacctcgacgcctacgcgcatggcgcgccgttggccgatgtttttgacaagaagctgggatactaagcaaggagccccgagaatgaaccagatcgtcgagaagccgaagaaatactccctggtcgagcgcgtgccggcagcttcgttcgaggaggagaggctgcatcgcaagcagcgtctcgcggcaaccttccggctgttttcccgctatgggttcgaccagggcctggccgggcacgtcaccgtgcgtgacccggagtttccggatcgcttctggatcaatccgctgtcgaagcattttggtcagatcaaggtctccgacctgcaactggtggatcatgacggtaacattctgattggcgacaagccgatcaaccaggcgggtttcgtgattcattcggcgatccacgctgcgcatccggaggtcatcgcggcggcccatacgcactcgacttacggcaaggcatggtcggcgctcggccggttgctcgatccgcttacccaggactcctgcgcgttctatcaagatcacgcgctgttcgatccgttctccggtgtcgtgcttgaggcggaagaaggccggaagatcgcggaggcgctcggatcgaacaaggccgtgatcctgcagaaccacggtctgttgacggtcggccccacgatcgaggcgaccgcttggtggtacatcgcgatggataacgccgctcgcgcgcaattgctcgccgaagcggccggcacgccaaagccgattccgcatgacgtggcgaagctgactgccagtcaggtcggcacgcataagggaggctatttcagcttccagccgctatgggactggatcaccgaggccgagccggatctcttcaactagggcgtacggttcacgccgggaggctgcggcgagttcgccgcggcaccggccggcatggagattctggtcgtcaaggcgagggggcagcattgggatcgcgaccggaaatagccgccggagatcaatcccggccgggcagtgatcgcccctggacggcagccgaaaaatacaagcttagaggcttggcaaaggcgaatatgcccgtcgagaagatcgcgcgaagcttgaaccgaaatgtcgcgtcgacagttgcggctgcagtgaggcttggcgtcacgttgagcgattgacgcatgggtttcaccccacggtccggcaatcgaccgggccttgttggccggtggcttgcgcatcagcaggcatgagctgcgcgatgaccggtatggttctgactgaaagcgcttccattcgcgacatgacttcatcgtgctcgcacgaacttcgaaattccatttccttgacgtgcgagcctcgcgctgattccatctgacagttgaccgtgctttcataaccgaaggatgtcacgccatgtcgacgcccagcgccacgttacaggaagtcatttcggccaacggcaaatacgctgccgaattcggtgacaaggaaaagctggcattgccgcctgcgcgacgctttgcgatcctgacctgcatggacgcgcggcttgacccggcaaagtatgctggacttgccgagggcgatgctcacgtgatccgtaatgcgggaggacgcgcgtccgatgacgcgatccgctcgctcgtgatctctcacaagctgctcggaacgaatgaatggttcgtcgtccatcatagcgattgcgggatgcaattgttcaccaacgaggtcatcagcgacctcctggcggacgatctgggcaccgcgcagttcgatggcaagacatggtcgaatccaaaacacgaaggcggttcggtcgcgggcaagttcgtccactggcatacgtttgaggacaatgccaagagtgtgctcgaggatgtgcagcggatcagaagccatcccctggtgccgaagcaaattccgatctacggcttcatttacgacgtgaagaccggccgcctcaacgaggtggtcgaggcgacggcagccggtcggcctgccgtttaggcgcagcgagtatctgctgcaatgcccgttacccaacgcctttctgtaggcggcctgccgcgccatcttgcgccggacctcggcgtgttcgtgatcgagacggagggggcgcgaaggctggcattcgaggcggggagccgtgaggacgcggaagcaatgacgcgggcaaactggttcgccgtggcgcttggcagcttttgctcacggcgacgtcatgcggagaatgccgaaagccgtttgcgggttgcgacggatccggagattgtgatctttcgggagtgggcgacagagtttgccggcgaggcggccgacgtctttgttgcctgtcttgattgagcgcggcgagacttgcttcgcgggacgtcaagcgcgctccggctgcaaagagaagcaattgccctctgcgtgtcgagttttggtgcttcacatgcgcggacgagagatctttggtgaatggcgacgctgacgttcgtgcgccgtggcgatagtatcgcaaccagaaagctgtcgcggtatctcccgcgagccaacgtggagtagcgatcatggcgctcgacggacccatctttcctcgcaatctcaccgcgaaactgcactacctcaagcgcggcgacgagaagccgaccttttaccgtatcgagccaccccctggcgtaccgcaatggaatggtatcgacgatgagcgtgaggtgacgatcgaggacgtgcgggggcgtgagtcggaattctcgctcgatcgtaatggtttctcgctggtcaacgcgcctaccgccgttgccaatttttacgactcggaagaaatcaagcgcgtctattacccggaagttgagcaattgctgcgcgacgccgtcggcgccagccgcgtatacatcttcgatcacaacgtacgcaatgcgagcgttcccggtctcgcaccgccatcccggcaggtccacaacgatcacaccgtcaactctgcgccgcggagggtccgcgatcacctcggagctgaggcggacgaattgctgaagcatcgatttgggatcgtcaacgtatggcgtccgctgcgcggtccggtattggattcaccgctggcgctgtgcgacgcgcgatcattcacggacgatgatctgattcccagcgatctcgtttacgctcatgttcgtggcgaaacgtctcgagtggaatacaaaccgaaccatcgctggtactatttttccgagatgcagactgacgaggcgctattgatccggattcatgacagcgccaatgacggtcgtgcgcggctatcgttccacacctcgttcgaaaatccgctcgcacccggcgcgccgccgcgtgagagcatagaggttcgcgccctggtcttttttggatagcagttcgagaagcgatctcggcggcgcaggaagccggcgttaccttcaaacgtaggctcgcgtccatcgccgaaatacgttcgagaaggcgagtggtctcccgccggcaccgtaccatcatcggcggcgccgtcgctgcggcgatctccggcgcgatgtccaggaaaccctggcctactccgcggacaaggtgaacgacccgacggcgaccacgacggacccctacagttattggatgagccacagcgcggccaactggaacggcacgggcctccactacagccaggattacggcttgggcgaagccgacgcccaggcggcccgtccggttggccgagacatggcaggcccagcagacctacgccaatcttgtgcaatcggccgtcgaaacgccgaccgtcgaatagctgccgacctcggtctctctggtgctgaggaccaatccggatggaaccatcgggttcgatcactacaactatcaatatggctactactcagtggcgtgccgccgaactggtcgatccacgaggtacgcggtttcacgccgcggccagcatcggttgcgccggccgccgtgtgatcatgagcgacagcacggccgcgatgatgccggttgcgcccgcgatcatgaaggcctgcaggtaatcgccctgcgccgagcgcatgaagccggcgaagaacgcggcgcaggcggcgcccaactgatggcctgccaccacccagccgaacaccagcggcgcgttcttgtcgccgaacgcctcgttggcgatgcgcacggtcggcggcacggtcgcgatccagtcgaggccgtagaacaccgcgaataccgacaggctcgcaagcgagaaatccgagtagggcaggtagatcagcgacaggccgcgcagcccgtaatacaggaacagcagtttgcgcggatcgaaccggtcggtgagccagcccgacagcgtggtgccgaacaggtcgaagaaccccatcagcgcgagcaggcctgcggcctgcacctcgacgatcccatggtcgccgcagaacgcgatcagatgggtgccgacgaggccattggtggtgaagccgcagatgaagaaggtcgcgaacaggaaccagaacgcccgcgtcctggcggcgcgcaccaggttgctgatcgcggcggtgaacggattgcccgcagcgggcggcgcgggctgatcgtcatgcgtgctgccgtatgagcgcaggccgaccgcggcgggccgctccggcaccagaaaatacaccagcgggatcagcgccgcgcagcatgcggcgaccgtcagcaccaccggcttccagccgccccacgccaccagcgccgcgaggcccggcatgaagatcagcgtgccggtcgcggtcgacgcggtcagaagccccatgacgaggccgcgattggtggtgaaccagcgattgacgacggtggcgccgagcacgttggcgaccgcgcccgagccgatgccggacaacagcccccagctcatgaacaattgccacggcgcggtcatgaaatagctcatgccggtcgagaccgacatcagcgcgagtgcgccgagcaccgtgcggcggatgccgaagcgctgcatcacggcggcggcgaacgggccggcgaggccgtagaggaagatgccgaccgcagccgacgaggagatcacgccgacgtcccagccgaacgctgattgcagcggcagcatcaggacgcccggcgtcgcgcgcaggccggcggaggcgagcagcgcgaggaagatcacggcgacgacgacgaacgcgtagttctggccgaacggccgccgcgacacgggggcggcttgaagcgctgttgagggcatgttacttaccggtacgtattgtgatgcggcgtgtatacgtaccggtcagtaacattgtcaagagggccgggcagatccggagacccgtcatgaagaaatccgtcgatgcgtcagccgagcgcccggccaaggcgtttccgggcgaagcggctgccggttcgcgtcgagaaaacgcgtcaaaacaggagtccggagccccgctccgatcccatcgggacggaaaaggcgtcagggccgccgaccggatccgcgcctccgcgagcgagctattctatcgcgagggcatccgcgcggtcggcgtcgacgaggtggtcgagcgcgccggcgtcaccaagccgagcctctatcgcagcttcgcctccaaggacgatctcgccgccgcctatatgcgcgactacgacctcgatttctgggagaagttcgagaaccccggcggcaagtcgtacagcgacccacgggagcacgtgctcgcctatatccgcgtgctgtcgacccgcgcggtgcgcgagggctatcgcggctgcggcctcagcaacgccaccgtggaatatccgtcgcgcgacaatccggcccggcaggtcgccgaagcgcacaagaaggtgttccgcaagcgcctgcgcgagctcgcggccggcatgggtgcgcgtcagcccgcggtgctcggcgatgcgctgttgctgctgatcgagggcatctacagcaccggccagcagtcggaagaggggccggcgcagtcggcgctcgcggtcgcgaagctgttgatcgatgcgagcgtgacgaaggggtgaggggacgccgcgccgatcacgccgggacgtcgatatgatcgggcgcaaggcccgcttggtggcgccgatacatcgcggtgtaggcggcctcgatatgacgggtgaagcgcttggtgtcgaacagcggcgccgtcggccgattggctgccagtctcgctttgagcgccgcgagcctcgatggatcggtggcaagatcgaccgccatctgctcgtaagcctccggcgattccgcaatcagctcgggcaggccgaccgcatggagcaggctcgccgcgacccggccgacaaacgtgtcgccgagaatggtcagcaccggcaggccagcccacagcgcatcgctggcggtggtgtgggcgttgacgggaatgttgtcgaggaacaggtcggcgaggcgatggcgcgcgagatggtcgggcagcgacgcccgctgtgcgaacaccaggcgctccgcagcgatgccgcgcgcgaccgcctccttgcgcagatttgcgccagactcggcgtgggcttcgagcagccacagcatgctgccctcgacgcggccgaggatcctcatccaccggtcgaacatgccgggcgtgatcttgtagttgttgttgaagcagcagaacacgaagcccgtcggagccagccccacctcgctgcgcgcaaacacgcgatcggtgatgacgcgcttgtcgtcattggcctgatagctgtcgggcagagccaccaccttctcgctgtagaattcgcgatggtggtgcgggattacggtccgatcggcgatgatgtagtcgatgaacggggcaccgagcgttcccgggtaacccagataattgacctggatgggggcaggccggcggccgaggacccgggtgcgggatcccccggtaaagcccttcaaatcgaccaggatgtcgatttccaatcgtcggatcaggtcggcgaccgcatcgtcgttcatgtccccgacctcgacaaaccgatcgaacgatgcctccagccgtcgccgcatcttcgggtcgttgttcggcgaccatgagatcgccgccgtctcgaatgtcgatcgatcgtgacactcgagcatcccggccatcaaatgcgctgtcgcgtggctgcagaaatccgacgagaaatagccgatgcgaatccggtcgtgatggtagcgctcgccgcgccagcgctggttttcggacggcggatggttcttcgcggtccatcgcgtggcgcacagcagctggtcggcggccgatgacggaacgctgcaaaacaggaatggcgccgtcgtcgcgttccggttcctgatcgtctcgatcagctgggcgcaatcggcgtcgaagttggcccagtcgcagatttgagatttggcgtgcaggcgatagccttcgatgtcggcctggtccggcttgagcgcgatcgccctgtcgtaggcagcgagagcctcgtggtagcactccagcatggatagcaccttgccgcggttggcgtgggccgctgcatcgtcgcccttgtactggatcgccttgtcgatgctggcgagcgccgcatcgggctgcctgagcctgagcagcgccatgccgcggttgttgtaggcctcgccatagtcgggccgcagcgcgatcgcctggtcgaaactcgcgactgcttcttcgagacggtccagcctggtcagcacgttgccgcggttgtagcaggcgccggcaatgcccggcgctcggtcgtagctcgccagcgcctcatcgaacctttcgaggtcgttgagcacgttgccgcgatcgttgtgcgcaccggcatcgttgggcctgagcgcgatcgcccggtcgaggcacgccagcgcctcgtcgagccgcccgagctttctcagcgcggcgcccctgtttcgatgggcatcggcatggcccggcaccagcgcgatcacgcgatcgtagctggcgagcgcctcctcgtggcggccgaggtctgcgagcgtcaatccgcgattgaagagcgccggcgcaaggtcgtgcctcagcgcggtcgcccgctcgaagctcgcgagcgcctcgtcgaagcggcgcagatcgcgcagcgcgttgcccagattgttgtgcgcatccgcgacgttgccgttcagcctgatcgcgcgccggatcaggtcgacgccgcgctcgctgcggccggtctgcgcggaaatcaggccgagcagatgcagcgcatcgaaattgccgggctgccggcggagaatgtcttcatagatcttctccgccgccgccagctgcccccgctgatgcagcgcgatcgcctgcgcaaaggcgggctgaacggcggccggactggatttctgaggctcacctgtttccgccatccgacgccttcgcgcgctccgtgtccgatccgggtttcaaaaggccgttgcaacgagcgggtcaaatagcatcgggccttggccgtcacgccagcagacatgaccgatgcggcgccatcgcccgtccatcaaaggttgaaaactggcagatcgccctcgattgcgcaacatccgatcacgagggcagggcgttggtgagaacgctgcagcacggatagccccgatgagcgcggtgacatccgcggaatcgttcgtcgccgcctgtcgctgcgcccgtgcggcctgcttgtttcacctctccccatttgggagaggtcgatttgcgaagcaaatcgggtgaggggccgcagcgccaacgagggaccggaatccctcacccggcgcggagcctgtgctcggacggcgcaaagcgccgatccgagtgcgccgacctctcccaacggagaggtgaacctccaaccggccgtttcaggcccagcgtcgaaacacgaggctggcgttgacgccgccgaatccgaaaccgttcgagatcgcgtgctcgatggccatcggccgcgcgacgttcgcaacgaggtcgatacccccggcggccggatcggcgttctccaggttgagcgtcggcggcgcgacttggtcgcgcagcgccaggatcgtgaagaccgcctcgacgccgccggcagctcccagcagatgcccggtcgccgatttggtcgcgctgacggcgatcccgccgtcgcgtccgaacacgcgcttgatcgcctcgagttcgccgagatcgccgaccggcgtcgatgtcgaatgcgcgttgagatgctggatctcgctcgcgcgcaggccggcctgcgccagcgccatctccatggcgcggcgggcgccgtcgccgtcttcggggcctgcggtgatgtgataggcgtccgccgtcgtgccgtagccgaggatctcggcgaccggcgtcgcgccgcgctgaagcgcgtgctcgagctcctcgatcacgagcacgcctgcgccttcgcccatcacgaaaccgtcgcggtcgcggtcgaacggccgcgacgctcgggcgggctcatcattgaaggacgtcgaaagcgcccgcgccgcggcaaagccgccgaggctcaccggatcgatgcaggcctccgccccgccgcagatcgcaacgtcggcctcatcggacctgatcagccgcgcggcatcgccgatcgcctgaacgctcgccgcgcatgcggtcaccggcgcaccgatcgcgcctttgtagccatagcggatgctgatgtgcccggccgcgagattggccaggaaggcgggcacggtgaacggcgacagccggcgcgcgccgcttgtcgccaccgtgcgcaccgcatccgcgatcgcgggaaacccgccgatcccggttgcgatcacggtcgcggtccgctgctgcgcccgcgcctcggccggcatccagccggcttgagctgtggcctccgccgccgccagcagcgcgaacaggatgaaccggtccatcttcttctggtccttgcgcggcgccgccagatcaggatcgaacccgccctcggcatcggaggccttgtcaggcacccggcctgcgacgcgcgccggcaggctcgctgcccattccggcaatgcccgaagcccggaccgccccgccagcagccgcgaccagaccagttcggtgccacagcccagcggggacaccgtcccgaggcccgttacgacaattcgacgcatggtgctcctgttgggcttttaccggtgtggccggaactcgaactgctgggtttttatatatgattatcatcatctattaccttgaccaactggacgtcaagccgcgatgccacgtcgcgcgcgtgttgcgttccggcgcctccgcggtgcttgacttaagagtattttgtaactacaaaataaatcatgaagatcatttgggacgaaccgaagcggctcgccaatctcgacaagcacgggatggatttcggtgatctcaacgagcggttcttcgacacggctctggttcgcaaggccaggctcaatcgatatcaagcgatcggtgtcaacatgcgcggcgtgatttcggtggtcttcgcggtctacggcgcggaagccgtcagcatcatcagcatgcgggccgccagcaagtcagaaggggacctctatgaagaaaaccgtcgctaagaaagcctacacgaaggcggacatgcgcgctgtgagcgacaatccggaatggaccaaggctgacttcgcgaaggccgttccctttgacgaactcctgcccaagctcaggaagggccgcggacccaacaaggcgccgaccaaaaagcaggtcacgctgcggctcagccctgttgtcctcgagcatttcaaggcaaagggcaaagggtggcagagccagatcgacgaggccttggtgaagatcgtcaagcgaaaggctggctaggcatccctgagccttcccgcaatttggtgagtttcggcgacagggaagtttcggtgggcagtgcacttaatttggtgatttagtgcaccgcaattgctgtcactacaattgcccgatcaatgcccgggcgaacagccgataggctggcacggatggcccggaatacagatgcaaatggtgctgccaccgggaggcgggggcggtgggtccaggttgaccggcgggatcggtggcggggaaatcggcagcgcatctccgtcgaaggcgcaggtgtcggtatcccccaacatgatgacgtgcggcttgccgtcactttgcagccaggtcttgttcggcgatgacgccgactgctggtaaacgtccagtctcgagtacaaggtgacggtggtcttgggcgtgccgctcgccgcgtagcaaaccgtcgtgcagtttctggcggggcaactgatcgattcctgcagcgtgccttcgagggcatgcgcctggtttgcagcgaatagtagaagcacggtaccgaccacccatcgcatcgctcgccccctgaaaaaaatgtaagtaagctggatgacgctgacaatgcactcaattgatgcctgataccactacttgcatcatacttgtcccgcatcctccgcgccgtcatcgctcgaccagccgcagcaagcgtagccaggatgagcgtagcgacatccgggaaatggtcccgttcccgcatgtcgctgcgctcatgcgggctacttgcttgtgcagtgtgatttggcgcaaaggcggatgggttggcgtcaagttcgtcactgagtgaatgaacaagcgtagcccggatgagtgcggtgatatccgggggatggtccatcccgcgtgtcgcttcgctcatgcgggcttcttgctaggcggctgaatctttacgctggattcaagctctcgcatggaacttgccatccgcttcgcggcgttgaattcgtagcacgctcggacgacagagcgagcacgattagggccgcaaccaagtctggggcacaaacttgatcccgtctcgccagcgctggacgatgcaatcgtggaaccatggctcaagcagctcaacatgatcagttacaattatttgggtgcgaggaccttggccgctcattgagtaattccacaagagctcaaacagctcatgcacagcagcctgatcttcatctgccagtccgtcgacgcgcccattttcgtcacgctcgggtggatagtgcgcttgcgaaggttggtccaacataaggaatgcaggcactggacgccttcggaggaagaacaatctgtgaagactgaggtgcgctgcaacgtgatacccgacccagttttcgccgctgcccatttggctaagcgaaagcggtccgtcgaccgtatcggcaactaccgtgagggacttcatatccagcctcaatggattgttgccgtgttccaagccaagctgtcgagcgtatgtcgtgaggtcccggttcacaagactcagggccgtgtcgagccggctttgggaggtgtcatcctccaatgcttgctccagttcagcaatctcggcgcgaaggcgctctatcgcttgcggaaggtggctgtcggtggccgtcgctttaacgttctccagatagtacgcaatacgaccggagacgcgggcctgttctgtaaaggactcctgttgaatccgtagccgctcgttatcttgaatacgggcagccaagtctcgttgaaccgcgcgaagttgctcttcaatgctggcgcgttgggcttcaagcgaagcgaggcgagcctgaagccgaggagaatcgcggtgaacagatgtaagctgctgctctattccaaccagggattcccttagctctgtaactgatggaacagggatggcgaggtggctgtcacacagcgggcaaatgtcagtgtgcccgtcaaccgctctaataagactaatagaagcgagtctggcctcctgttcttttgcctccgtggcaaactcggaagcttcgcggccaagtcgttctacatctgcgatttcctcgcgcatctcctggagctcgcctcgaagtctgcgacgccgatcttcaagttcgctaagatcggcttcaggctcctctattgaggttatatcgataggacgaggtgcagaagcctgtcgcaacagctccatcgcactttccgcgttggaagcagttgcatctggtggtattagtcggacgcgtcgagcctcttgcagaagagcctgtgcacttgtcgacacttcacgcgtcaccgcgcttgcgtctgcatattcccgttcaagctttcttaatctcgctcggacctcattgtagcgcatcagcgtcaggaagtgattttcgtcaatcgcgccaaggaaatacggcaggctgtctctgatcgccgcgggcatgaattgctcgccctgcctatgaaatagcaagcgcctgtttgcgatctcgtcttggccttgcaaggagaacaaaatcgcgtgccgggatgacgcttccaatggaagcctggttgagccctgctccgggacatgcagattctcggatattccgaggattgtggatagctgggtcttcaaaccctccgccgtaatgttcttctggaattcggccgaggtggcggggaggatctcaacaccacgagcaaaaaaggtgtcgtcgcttgcgcgtcctgccggaccaggattgcggcgtgcaagaaggattccttctccgtcgtgatcaagatggagagcaaaccaagacacgctcttgcgtatttccccttcggcgacagtgcactctgcgcgcccccaacaataatcgacaatatccagaagagaagacttacccgtctttgaagcgccggtaacgatgttcaggctacttagtttgaattcgacgtcgcgccgttcaccttcatgcgaatagatagaaattgaacgcaattgaagactcatggcgatactcccaatccctgcataatagatgaagcgctcccctggtttgcaaaccaccttccaagcagggcggctgcactgcgggcttcactcacatcatccgtgaccagcaatggccgcgccgaacgaccaatggacttggtacctggccttagcccccctccgttgaatgcaagtaccttgtgttgaatgagaaagagcagcgcctcacgagttaccggcactagtcgctgagccctgtccggaaattcagcgagaatcggattgtgatccgcggtccatccggcgaatgcggtcgatgaattgccgggaagctggcctcgtgtcgccggatgcaatacgaggggaagcacaacgaacgagagcgcgaagctaaacggttgctttctcaatctaaaaaattcagcgacggttcgaaaaattagctcgccgcagaaagccgggttcaaattgcgcgcttcctcagaaggcctgtctgaccaccgcaaatcccattgggtcttatgcatcttccggctcctctattgaggaaaagagagatgcatagttgcgatgccaaccgatcctgagatcattggctaagatatggtaggaacctacattgagaaatcttgcagttaccgttctaaagggaaaccgggcctcggcctctacccaatgatacagttgctgacctgcctgccgagctgtcgcatcatcggctgcatcgctgagaccatcacacatagtctcaaatcgaggctgccattcttctgtaagcgttttttcgaatcttgccacctctccatcaaacaggagattttgccgagtccacagagaccgctgcgtgaaggcgcggtaataatcccgcttcgcgtactggacccttgtgtttccaaccccgacgcttcgcagctgccggacaaatgtcatttcatttagtgcgtcgagttcggactgcggggggtcgacatgctccatatctgtcgggagagcgtcacgcctcatggcgtcgcggatgtcatcgagctttccctcgagctcaagaattgagatcacgcctccctcctgaagcgcgacgcatatgcggggccaccaccacccttcaagcatttggcgcgcgacagaggccttgccccgcggagcgatcaacttcagacgctcttctatggccgtttcaagctcggtgattacagggctttgatctaacacctccactgcgttgaggagtgaattacgcatctgtggcgtcagcttttgaaaggcggcgaaagcatccttcaatgttttgttttcggacgactcggctgcggacacgagtagcttttcagcctgagtgatgtcgcggtgggcgtcggggcgcaagaaggaggctgcggagtggggtggtgcatggccagtagttatgagaacgaaccgactccggccagggagcgccggattctctctcgtcgcttcgcaccaaatcctaagagtcttccaaagatcgacgctcgtatctgtcagatctcccaccttgcttatgtgatgtttcgtttgcagcagctcgatgggctctccgtctttctcgaacgagacgtcgtcgaagcgttctatcgcaacatcaatgctgaattcaccgtatgcaaggcgaaggctctcaaatagagcaagccgagcctgataatagtagcccgcagccgaactcgccgctgtaaaagtctgcttcttcgtagtcacgcctgccccggctctcacctagccccttccatacaacgaatgcgtgcacggccgccgacatacgtcaagccaagagcccaagtaaagaaaagttatgcagaagagccacaacgtctccgggcgtcgccacaaagggattgagtcaaaacaagcgtctgcatgctctcatccgcggacggagagaaaggactcgttccgtcaaagccaaatgctcgcaatgtaaacaattttctatagcaatatcaattgtatagcggcctgcaggttttattctgaacggcgcgccagacggctctttgcaagagcgatcacttcatcccctccagcaccttccttgcctcccccaacaacgcccgtacctcccaccgctcttcgatcgcctccctggtaaacaggccgtgcttgcgcgcgttccggtttgcccttggcgcgccagatccctttgcgccgccgtgcatgcggcaacgcctattgccgcgcaccgccggcgcgcggcacgcgccgccgcaaggggtcttaacgcggcaacgcgggctcgccagctttgccccggtcgttccgatatgaccgctcaagccttggcgttctgcctggcatcggcggcatcatgcgttcgcctgccgcgcgcggccttcggcgcccgcgccgcggatgccggtggcgctggtggatcggctgtcgaggcgaagacgacgcgactgttggtgctcgcccagagcgaagtcgccacaccgaatatcgtggcgcgacgacttcgccatggtggacccggatcgagggcaatatccggtacgctgatgtttgatcggcgcccgcgtcaaagcaaacgaactcgcgcgttaagctcgatgctgcgcgatcaggtcaattcgggaactccggccgtcgcatcatccattccggttcaggtcgactccgcggcgtcattgatcgcggtcggagcacttgatccattgcgcagattgtcgggcggcaaggtcgaaatttgaccggctgttaaccggcctcgccgagactatttctgccagaccggagacgtggaagtgtccttccaactgaccgtcttgaaagtgctggccggccagtccgccgggcgtgcctccgttgccgaaatccggcacgccgtcgaaatcctcatgaacagcggcaaagactggaccgatcgcatgaagcgcttggctcagcatgcccccgatctaaatatcttcacggccagatacattctccgcgatgacaaaggctgggaaatcaccgatgagggacggcaattcctcgccgcgctcgaggcggcggttgccaatcggatagagccaccgcctcgaacaatcgtcgatctgccatccagcgtacccgcagcgaagccagtggcagaggtcgcaagatcgcttgatcctccccaaagacgccgcgacaggccgcgacgccggcgggggaaggatcgatccaatcggcgcagggcctgaattggtttgttgggctttggagcgcggggtcgcatcaagccttcgttagtggaaacgcaatctttctgacggagcatcgatcagatttgcatcatttattgattggccacggaatggttgtccttcccgacagacgaaagtctgcgcgcaatccgtctttggatgatgccctcatcaggtttgacgacctgtcgctgtgctgtaccgtgcgggacatcacggaggatggcgccgctgtgtgggcagaccagaatttcgaactgcccgatcagttcaccctcatcattccgccgagcaagacctggttgtgccatgtgatttggcgcaaaggcggatggatcggcgtcaagttccacactgagtgaaacgcgtgcttgcgccacgctgaacgcgacgcccacggccgtatgtcgtgcgcatgcgcgggattttgcaatcgacgcgcgctgactgcaccgggaaggtatgggaaatgatcccgccgcggcagcaggcccgtgcctgtcgtggccgtgccgcgccggcgtcgtagccggctgttcgagggattgctcgctcagccctgagggaagtgtgtcgccctcgcaacgttgcaattgttccgctggggaccgggcgtgtttgctcttcaccggagcgccgattcattctctaatgatgacggaccttcggcggcgattgtatttccaagatgttcatttgagatcgggtccaagaggtcgctgtcagcgccagcgacctcttcgttttgcttcatttcgttttgctgcattcatttgcggagggatcctccaatgccgatacaggtgtgggccattgcagcttcgatcggctggacagccgttgtcgggacgacgctgctctacatgatttttggacccggctaggtcgacgccaacccatcaggtggacgacgcggtcatggtcgaaatctcattcccttcagcatcttccgcgcttcccccaacaacgcccgtatctccctccgctcggcgatcgcatccctggtgaaaagcccgtgcttgcgggcattccggtttgctctcggcgcgccggatcccttggcaccgccgtgcatgcggcagcgcctcttgccgcgcactgccggcgcgcggcacgcgccgcccgagcgggttctggcgccgcagcgcgcgctcgccagcattgggccggtggtgctggtgtgattgctcatgcctgggcgttctgcccagcgtcggcggcatcatgcgcgcgcctggcgctcacggccttcggcgtccgcgtcttgggtgccggcatcttgtcggagacgatcacgttcgcatgctgggtgacgttgccgacgatggcgttgccgccgtcttccactttcacgttctgcacggtgatggcgggttcgccatggctgcggtagcggttcagcgcctcgatctgggcgggaaaggtgcgggcgagccggccgagggcgcgcgccgcgctgtcgtgctgggcgaggtcgtcggcatgcgcgaggtgctgggcacagcgcatcgccatcacatgcaccgagaccatctgcgccaccagcatggcctcgacggcatcgcgcgggcgaatgctcttcaccatcgatagcatgaaagcgaggttgacctcgctgggcctgccgccgctcacgctggccctgaccaattgcctgaggatgccgtccatcgcgtcgcgatcggcgaccccgagcgcgttcgccatcagctgctcgccgagcttccggtcggggtgatcgatcgcgtagccgcgccgcgagagtttgatgcgcggcagtgcggctgcttgcggctcggcgggtagggcggccggcgtcggcacggtgagatcgggggcagtggtcatgtcgatagtccctggaatgcgccgcgcgcgcaggcgatcgctcgctgcgggcggcgggtgcgatgtcgattgagggtttaaggatgtccggccgcgatcgcagccggcgagcccgcgcttgcgggcgagggggcgcctgcaggggcgcttgcatgatttcggaatattggaaatatgcccctgatttgcccgacgtgtcaagccgccgtgtcaggcgctggcggcgggcctgcgcctttgcatggggttgttttcgcgtttttcgccgcgcgcattgattgcggcgagttccgccaccgtcgtcagcgatgatcccggcgagacacggtgcgacatccgcgctcgcggatgccctgcgcggggccgcctgcgcatcccgcaaccctcaatccgaagacatcggggcgcggatcgttatactgccgacagctttgcgaccgggctcgaggcccgcatctgaggacactgctgaaatgagcgagaccattggccaccccgatcccggcctcgatctgtccgatggtttcaagccgcacacctcgcattggggcgtgttctcggcgcggctcggccaagccggcctcgaagtccggccctatgccggagatcccgatccgaacggcatcatcaacaacttccccggcgcgctgcgccaccaggcgcgcatcgcgaggcccgcgatccgccgtggctggctggagcgcggccccgggcccgacgaccgccgcggccgcgacgaattcgtcccggtcagctgggagaaggcgctcgatctgctcggcggtgagctcgggcgcgttcgcgacacgatcggccccggcgcggtgttcggcggctcctatggctggtcgagcgcgggccgcttccatcacgcgcagagccaggtgcatcgcttcctcaacatcgcgatgggcggctatgtccggtcggtgaactcctattcctccggcgcgtcctcggtgctgctgccgcagattttgaccggctacgaggacatcaccaagcgcaacgtcacctgggagcagatcgctgataagaccgacatcgtgctggcgttcggcggcatggcgctgaagaactcgatggtggccggcggctcgatcagcaagcatgtcgagcgcggcgcgatgcaggccgcgcaccgccgcggctgcgagttcgtgctggtcagcccgctgcgtgacgatctcccggtcgaggccggcgccgaatggctgaccgcgacaccgggcaccgacaccgcgctgatgctcggcatcgtccacactttggtcagcgaaggcctgcacgaccaggccttcctcgatcgctacaccgagggctggccggtgtttttgcgctatctcacaggcgagaccgacggcgtgtcgaagagcgccgattgggccgcgtcgatctgcggcatcgacgccggcacgatcaggacgctggcgcggcggcttgccgggcggcgcgcgctgatcaccgtctcgcattcgctgcagcgcgccgagcatggcgagcagccggtgtggatgggcatggtgctggcggcggcgctcggccagatcggcctgcccggcggcggctacgcctattcgctcggcgcgatcggctattacgggcgccgcgtcaacgccgtgcccggaccgacgctcggccagggccgcaacggcgtcgccgacttcattccggtggcgcgcatcgccgacatgctgctcaatcccggcacgacctatcgctacaatggcgagacgcggacctatccggatatccgcctggtctactgggccggcggcaatccgttccatcaccaccaggacctcaatcgcctgcgcaaggcgtttgcgcggctcgatacgctcgtggtgcacgagctcgcctggaccgcgaccgcgcgccacgccgacatcgtgctgcccgcgaccatgacgctggagcgcgaggacatcggctattccaccaacgatcccctgatggtcgcgatgcaccggatcgccgagccgttcggcctcgcccgcgacgactacgacatcttcgcagatctcgccgagcggctcggggcccgcgagcccttcaccgaggggcgcacttcgcgcgaatggctgcaacatctctacgagccgacccgcaaggcgctcgccgcgcgcgggctggaggcgcccggcttcgatgagttctgggcgcgcggcagtctggtcgtgccgcagcatctcgacgatggcggcgcgctgcgccgcttccgcgaggacccggtcgcgcgtccgctgccgacaccgagcggccgcatcgagatcttctcgcagaagatcgccggtcatggcgatgcggattgcccgggccatccggtctggctcgcgaagacggacacgccgacacctgatacgccgtgcttcctggtcgccaaccagccggtgacgcggctgcacagccagctcgatttcggcggccattcggttgaggccaagcatcgcggccgcgaggtcgcgcgcatgaatccgcgcgacgctgcggcgcgcgggatcgccgacggcgacatcatccgcatcttcaacgcgcgcggcgcctgccttgccgcggtgcatgtcaccgacggcatcgcccccggcgtggtgcaactgccgaccggcgcctggtacgatccgatggaccccgaggacgaggcgccgctctgcgttcacggcaatcccaacgtgctgacgcgcgatatcggcacgtcctccttcgcgcagggctgcaccgggcagctgacgacggttcaggtcgagcgcttcaacggcaatctgccgccgatccgggcgttcgatccggcgtaattttacgccgatcacgaacaaatcatccatcggcgctggaaggcgccgatgcgttcggctacggcatcacgagatcgcccctaattgctggatcgtctgagatgcacatgaaaaccctgtcttatcttgtcgtcgccgcgaccgtcgcgttcggtgcctcgaacgcgctggcgcagtcggccgccgagccggcctacggaccggaactgcagggtttcgactatccctatccggtcgagcattatcgtttcagctcgcaggggcaggagctcgacatggcctatctcgacgtcaagccttcgacgccgaacggccagaccgcggtgctgctgcacggcaagaatttctgcgccgcgacctgggacggcaccatcaaggcgctcagcggcgccggctatcgcgtgatcgcgccggaccagatcggcttctgcaaatccagtaagccggaacgctaccagttcaccttccagcaactcgccagcaacagccgcgcgctgctcgcctcgctcgggatcgagcattcgatcatggtcggccactcgaccggcggcatgctcgcgatccgctacgcgctgatgtatccggacgccaccgaccgcctggtgctggtcgatccgatcggcctcgaagactggaaggtcaagggcgtgccgtggctcagcctcgacggctggatgcagcgcgagacccgcgtcaccgccgacagcatccgcgcctatgagcgcgcgacctactatgccgacacctgggatccgtcctacgaggtgtgggtgcagatgctggcgggcatgtatcgcggcgagggccgcgccgccgtggcgtcgagctcggcgcggctctacgacatgattgcgacccagccggtgttctacgaattcgagcggatcgcgccgccgacgctgctcgtgatcggcgacaaggacaccacagcgatcgccaaggacaccgcgccgccggagatccgcaagacgctcggcaattatccggtgctcggcaaggaagccgcgaagcggatcccgcatatccagctgatcgaattcccggatctcggccattcgccgcagatccaggcgcccgcgcgcttccacgcggcgctgctcggctggctgcagcatccggagaccggcgcgacgctggtcaagtaagggacgacaggatttaagtcgattcagcgcctcgcttggcgcgctcctgcgccctcgcatgcaccggtgacgaccgccgcgcgccggggcccggatgcacatggacgctcttcgcgctcagcggctcgccgcattccgagcagaccatgaccggatcgaacatcttcttgcagctcttgtgttcgtgcagcatcggccggccgcgcgcgtcgaccatgtggacgttgccccagtgcacgatcgacatgatgatcggatagagatcgagccccttctgcgtcaggatgtactcgtagcgcttcggcgcctcggaatagggaatcttgcgcagcacgccgaaccgcaccagcttcttcagccggtcggcgagcagatgccgggtgatcccgagcgaggcctggaagtcatcgaacctgcggatgcgcaggaaacattcgcgcaggatcagcaggctccagcggtcgccgatcacggcgaccgtgcgggcaagcgagcatggctcctcctcgagtgcatcccatttcatcggcgtctcctgcacactgcaacgatatcgcaaaccaaattctaaaacagaactgacgttgtttcaataggatgcttccaaagtggccgcctgtcgcgcattggatgacaaatatcatattgacagttctaaaatagaacttatggttcgggccacgatcaaccggtggcgacggacgagcgctgcgcatcgaagggaagggcgttccatggctgctccgctcaaggtcgaattccacttcgatttcggaagtccgaacgcctatctcgccgagcttgcgctgcctgggatcgagaagcgcaccggcgtcaagttcgactatgtcccggtgctgctcggcggcgtctacaaggcgaccggcaacatgtcgcccggcgagtccctgcgcggcatcaagaacaagcccgaatacaacgcgctcgaaaccgagcgcttcctgcgccgccacaacatcacgacgttcaagtcgaacccgttcttcccggtcaacacgctgatgctgatgcgcggcgtcgtcgccgccgatttcgagggcctgttcgagccttatttccgcgctgcctatcaccacatgtggtccgagcccaagaagatggacgatccgcaggtgttccgcgaagcgttcctgtcctcgggcctcgacatcgatcgcatcatcgcccgcgcgcagcaggacgaggtgaagaagaagctgatcgagaacaccagcaatgccgtggctcgcggctcgttcgggtcaccgaccttctttgtcggcgacgagatattcttcggcaaggaccgtttgcgcgaggtcgaggacgagatcgtggcgcagctggctgccgggcggcgcaggaccgcctgagcaggaaattcctcaacacaacaaatcaagcccgaagggctgcgacagggaggtttcagtgccggcgtcgatccagattgtcgaaggaagtgtggaaggcctgccgaaccggatccatgaggtgatcgattatcacgtcgcggcgacgccggatcacccggcgctgatcgacgacagtacgcgcctgacctatcgcgagctcgatggggcagtcagtcgcgtcgccgacgccttgcaggcgctgggtatccgccccggcgaccgcatgatgatcgtgagcgagaattcgatcccgctcgcctgcctgctgctggcggcgagccggctcgatgtctggtcgatcgtggtcaatccccgactgtcgccccgtgagctcgaccagatcagggatcacagcggcgcccgccgcgtgttgctgaccgccgaggtgtcgcaggaagctgccgcccatgccgcgcgctatgaggctgtcgtgcaggatgtcggcccgctccacggcgtcgccgtcaccagcttgaacctggcaacgattgccgagccggtcgaggccgatggcgccgaccaggtcgcggtcctcatctatacgtccggcaccacgggcacgccaaaaggcgtgatgctgacgcaccgcaatctcctgttcagcgcccggggcaccgcgggcttccgcaagatgacggccgatgacgtgcagtattgcgtgctgccgatctcgcatatcgtcggcatctcgctgctgacgatgaccttgatggtcggcgccaccgtgcgcctggtcgccaaatacgatccggcggcgctggtcaaggcgatgactgaagagggcatcacgatcctgaatggcgtgccagcgacctatcagcgcctgctcgaatatcgccgcaacgcgggtctgccgaagctcgatcgcggccggttgcgcgtgatctcggtggccggcgcgccgctcgacctcgagctcaagacccgggtcgagcaggagctcggcctgccgttgctcaacggctatggcatcaccgaatgctcgcccggcatctccggcgtccggcccgacaatccgcgctccgaccacgccgtcggcgcagtcatgccgggcctcgaagcaaagctggtcgaccgcgatctcaagccggtcgctgacggggaggtcggcgagctccacgtccgcggaccgaacgtgatgcgtggctattaccgtgcgcccgatctgaccgccaaggcgatcgaccccgacggctggttcaataccggcgatctggcccgcttccaggatggcgtcctctacatcgtcgggcgcaccaaggagatgatcatccgttccgggttcaacgtctatccggccgagatcgaggcggtgctgagcacgcatgacgctgttgtgcagtgcgccgtggtcggccggccggtcgagggcaatgaggaggtcgtcgccttcgtgcagctgatcaagggctcgacggcaactgtggcggacctgatggcccatgttgccccgcaactcacctcgtacaagcgcccgtcggagattatcctgatggacgcgctgcccgcgacatcgacgggcaagctgttgaagcacaagctggcggaatcgctgcgcagctgaggctgccggcgtcggagcaagacagttcacacaaacagaaccggagtacaccatgcagaagagaaacaagacggttgccgtcattggtgccggtgatttcatcggcggcgagatcgccaagaagttcgcttccgagggcttcacgatcttcgccggccgccgcaacggcgacaagctcgcgccgctggtcaaggagatcgaggcggccggcggcgagatccatgcgcgctcgctcgatgcgcgcaaggaggaagagatcaccgccttcctcaacgacgccgacaagcatgcgccgctcgaggtctgcatcttcaacatcggcgccaacgtcaatttcccgatcctcgagaccacggagcgcgtgttccgcaaggtttgggaaatggcctgctactctggcttcctggccgggcgcgaggcggcgcggctgatgacggcgcgcggcgagggcaacatctttttcaccggcgccaccgcctcgctgcgcgggagcagcggctatgccgcctttgccagcgccaagttcggcctgcgtgcggtggcgcaggcgatggcgcgcgagctcggaccgaagaacatccatgtcgcgcatctgatcatcgattccggcgtcgataccgaatgggtgcggcagcgccgcatcgaggcgctcggtccgaacgcgctcgacaatcccgatctgctgatgccgccggcctcggtcgccgcgtcatattggcagctctaccagcagccgaagagcgcctggaccttcgaactcgaaatccggcccttcggcgagaagtggtaaggagcaggtccgatggagctcgcgctatcccctgaagatgcggcgtttcgcgacgaggttcgcgccttcatcaaggacaattatccggcggagatgcgcgtcgccaatccggagaccgatctctccaaggagcagatgttgttgtggcatcgcatcctgcacaagaagggctggatcgcgccgctctggccgaaggaatatggcgggccgggttggtcgatcacccgccgtttcatcttcgagcaggagacgacacgcgccggcaccatgccgccgctggcattcagcgtcaccatggtcggcccggtcatctacactttcggcaatgcgacgcagaaggcgaagttcctgccgcggattctctccggcgaggactggtggtgccagggctattcggagccgggctccggctccgatctcgccaccgttcgcaccaaagcggtgcgcgatggcgaccactacatcgtcaacggccacaagacctggaccacgctggcgcagcacgccgactggatcttctgcctggtccggaccgatcccgccgccaagccgcaatccggcatctcgttcctgctgatcgacatgaaatcgccgggcgtcaccgtgcgtccgatcatcaccatcgacggctcgcacgaggtcaacgacgttttcctggagaacgtccgggtccccgccgagaacctgatcggcgaggagaataagggctggacctacgccaagttcctgctcggcaatgagcgcaccagcatggccggcatcggccgctcgacgcggtatctcaacctgctgaagacaatcgtgaaggccgagatcccggaagacgatccggcgcatctggaattcatccgggacatcgcccgcgtcgagctcgacgtgctggcgctcgaggcgaccgagcttcgcgtcgtcgcccagatggcccgcggcatcgatccggggcctgcggcctcgctgttcaagatccgcggcaccgagatcttccagaatatcaccgagctcacgcatcgggcgatcggcaattacgggcttgcgatccgcgagcatccggtcagcgccaatcacttcatgccaggcccggactacggccatacggcgtcggagaaatatctcaactcgcgcaagctttcgatctacggcggatcgaacgagatccagcgcaacatcatcgccaaggcggtgcttggtctctagctacaaggcaacgaggatcggatggatatacagttcacggaagagcaggaattgttgcggtccagcgtgcagcggatgctacgcgaccagtatgatttcgacgcccgccgcaagatcgttgcgagcgaggaggggcttggccgcaggcaatgggatgaattcgccgagctcggcctgctcgccgcgccgttctcggaagccgtcggcgggctcagcggcgggccgctgtcgaccatgatcatcatgcacgagttcggccggcatctcgtggtcgaaccgttcgtcgagacggtcgtggtggccggcagcctgatcgagcgggcgggttccgaggcgcagaagcaggcctacatcgccgatatcattgcgggatcgaagctctggacgctggcctggaccgagaagggctcgcgcttcgatctcgcgaccgtcaccacgaccgcgcgacggtatggcgacgactatgtgctcaccggggagaagacggcggtcgtggctgcgccatgggcggatcatctcgtcgtttctgcccgcacctcgggccatcgtcatgatcgcggcggcgtcagcctgttcgtggtcgatcgccgtgccgccaatctcgatctaaccagcttcaagacgatcgacggacgccgtgccgccgagatcagcctgcgcggcgtgcgtggagaattgctcggcaaggaaggcgagggcgtcgccgcgctggaagcctgccgcaaccgcgcgatcggtgcgctctgtgccgaggcggtcggcgcgatcggcgagctgaacgacgcgacactggaatattccaagacgcgcaagcagttcggcgtcacgatcggcagcttccaggtgctgcagcaccggatggtcgacatgttcatcgcgcatcaggaggcgctgtcgctgatgcagcatctgtcgctcagcctcagcgagggtgaggccggcctctcgcggctggcttcgggcgccaagtccaagatcggctatgccggcaagttcgtggcagatcaggcggtgcaactgcacggcggcatgggcatgaccgacgagctgaacgtcggtcattatttcaagcggatttcctccatcaacatccagttcggcgatcccgcctatcacgtgctgcgctatgcgcagctcgacgcggccgcttaaagccagagaggcaagcatgtcacaagatgcagtcatcgtttccaccgcgcgtaccggcgtcggcaaggcctatcggggcgcgctcaacaacaccgacggcccgaccctggccggccatgtgatggcggaagcggtgaagcgcgccggcatagcgcccggcgaggtcgaggacgtggtgatgggctgcgccatgcagcagggcaccatggtgatgaacgtcgcgcgcaagggcgcgatccgcgccggacttccagtcaccgtcgccggcaccacgatcgaccggcaatgcgcttccggcctgcaggcgatcgcggttgcggcgcgctcggtgatgcttgacggcgtcgagatcgcgatcggcggcggcatcgagtcgatcagtctggtgcagaacgagcacatgaaccggttccacgccgtcgacgacgagctgatggcgatgaagcccgagatgtacatgtcgatgctggagacggcggaggtcgtcgccgagcgttacgggatcggccgcgacaagcaggacgagtacagcctggaatgccagcggcgggtcggcgccgcgctgcagggcggccgcttcaacgacgagatcgtgccgatcacaaccagaatggccgtggtcaacaaggacaccaaggaagtcagctatcagcaggtgactctggccaaggatgaaggtccacgtccggacaccaccgcggacggcctggcaaaaatcaagccggtgttcgagggcaagaccatcagcgccggcaatgccagccagctctccgacggtgcctcggcctgcgtgatcatgagcgacaggatcgctgcgcagaaagggctgaagccgctcggcatcttccgtggtttcgttgccgccggcgtcgagccggacgagatgggcgtcggcccggttgccgcgatcccgcggctgttgaagcggcataatctgaagatcgacgacatcgatctctgggagctcaacgaggcctatgcggtgcaggtgatctattgccgcgacaagctcggcatcgatcctgagaagctgaacgtcaacggcggctcgattgcgatcggccatccctacggcatgactggcgctcggctcaccggtcacctgctgatcgagggccgccggcgcaaggccaaatacggtgtcgtgaccatgtgcatcggcggcggcatgggcgcggccggtctgttcgagatcgtccactgatcggaaacgcgggagagacttgtgaagacagcaatcactgaactattcggtatccagcatccgatcatccagggcggcatgcattatgtcggcttcgccgagatggcggccgcggtgtccaacgccggcggcctcggcatcatcaccggcctgacccagcggacgccggagctgctggccaaggagatcgcgcgctgccgcgacatgactgacaagccgatcggcgtcaacctgaccttcctgccgagcttcaccgcgccgccctatccggaatatatcgcggcgatccgcgaggggggcgtcaaggcggtggagaccgcgggccgcagcccggagcagtacatgccggcgctgaaggcggcgggcatcaaggtgatccacaaatgcacctcggtgcggcactcgctgaaggccgagaagatcggctgcgatgcggtcagcgtcgacggcttcgagtgcggcggccatcccggcgaggacgacatcccgaacatgatcctgctgccgcgcgcggctgacgagctgaagatcccgttcgtggcttcgggcggcatggcggatgcgcgcagcctcgttgccgcgctgtcgatgggggcgtccggcatgaacatgggcacgcgcttcattgcgaccaaggaagcgcctgttcatcccaacgtgaagcaggcgctgctcgatgcagacgagctcgacacgcggcttgtgatgcgcgcgctacgcaacaccgagcgggtgctgaagaacaagggcgtcgatgagctgctcgagatcgagcgcgagaagggcgccaggctcaagatcgaggacatccacgagcaggtcgccggcgtctacccgaaggtgatgatcgacggcgagatggatgcgggggcctggagctgcggcatggtggtcggcctgatccacgacatcccgaccgtcaaggagctgatcgatcgcatcatgacagaggccgagcagatcatccggcagcgcctgaccggcttcctcgacggcaagttcgaaaccaagccggcgcgcgcggtcgcctgaaggagagtgccatgacggagcatgtcaaggttgagatcgccgcgggcgtgatgacgctgacgctgcagcggccggagaagaagaacgcgctcaccggcggcatgtatgacgcgatgtcgaacgcgttgaagcaggccgaggcggatccgtcggtccgcgtcatcctgttccagggcgacggcgacagcttcaccgccggcaacgaccttgcggatttcgccagccaggcccgcggcgagagcgctgtcgatagcccggcgcaccgcttcatcgacaccatcagcaaggccggcaagccgattgtcgcggccgtgcagggcaatgccgtcggcgtcggcaccaccatgctgctgcattgcgacctggtctatctcgccgagaccgcacggctgatcacgccgttcgtcaatctcgcgctggtgcccgaggcggcgtcgagctggctgctgccgctcaggatcgggcacgcgcgtgcctatgcgatgttcgcgctcggcgagccgatggacgcgcagggcgcgcaggcatcgggccttgccaatgccgtggtgccgcaggctgatctgcgcaagaaagcccatgatgcggcgatcgcgctgaccaagcggccggccggctcgctcagcatgaccaaggcgctgatgcgcgagcagcagcggatcgcggcgcagatcgccgaggaaggcgtgctgttcaagcagcggctgacgacgcccgaggcccgcgaggcctttgccgccttcgccgaacggcgtcagcctgacttcagcaagctgtcggcctgaagccgtcaggagttcacgggtagatcgagggagcggcaagcatgcaaatcgtcggcagccatcaatatcccaccatggaaaccgtgatctacggcaaaccggcagccgaggcgctgcgcgaggaggccgagcggctcggcgccaagcgcgtctacctgatcgccagccggacgctgaacaccaccaccgacgagatcgagaagatccgcaacggactcggcgatcgccatgcggcgaccttcgacggcgtgccgcagcacactacgcgggacgtggtgacgctgatcgcgcggcaggccagcgaagccagggccgatttggtcgtcgcgatcggcggcggctcggtggtcgatgcggcgaagatcgtgctgatgtgcatcgagcatgagatcttcgagccggcggggctcgacggcttcgagaccacgccggatcgccgcttcggggcgttccgcaacccgaaggtccggatgatcgcgatccccagcacgctgtcgggcggcgagtacaattcaggtgcgctggtcaccgacaccagccgcaagctgaagcagatattcaaccatccgatgatgatgccgcgcagcatcatcctcgatccggcgatgacgcgatatacgccggagaagctctggctcggttcgggcacccgcgcgatggatcacggcatcgaggcgatctgctcgagccggcccaacgtgctggtcgatgcggtgtgccagcagggcctgcgctatctgcatcatggcttgctgcgcaccaagtccaatcccgacgacgaggcggcgcggctgagctgccagctgggctcgtggttgtcggcgttcggattgcagtcgcgggtgccgatgggcgccagccacgccatcggccatgtgctcggcggcacttgcgacgtcccgcattacttctgcacggctgtcatgatgccgagcgtgctgcgctacaaccgtcccgcgacggaaacagcccagcaggcgatcgccgccgcgctcggtgcgccggggcgcgacgcgagcgaggcgttcgccggcttcatcgcggagctcggcctgccgcggcggctcgccgatgtcggtgtcggtgaagaccgcttcgaactgatcggccggaacgcgatgctgtcgatcttcacccgcgccaacccgcagccgatccgcgagcccgccgacgtcgtcaagatcctgaagctcgccgcctgaggcgagagcacctggagcagccgccatggccgccttgcgcatcttctcctatctgccgaacccgcgggtttggaaggcaaccatcgcggcgcggttctgcggcgtcgacgtcgaggtcaggggcgcctccggcaaggagttgcgggactggctgtgggactacgatgcgcatcccctgaccgagcaggagcgcaccgcgatgtcggcgctcgcgcggaccgggaaggtcgggctgactggcgcgcagctgttcaagaccgatgcgttcatggcggcgcagccgttcggcaatgtgccggccgcgttcggacctgacggcaaggtcgggatcttcgaatccaacagcatcatgcgggcggtggcgcggctcggcgaagccaagttcccgctctacgggcgcgacgcctatgaggcgtcgaggatcgacagcttcctcgatgtcagcctggtgtttgcgcgggattcgcagatctatctgctcgcgctgtccggcggcacggtcgacgcggcgattcatgcccgcgccagggatgcgttcgcgatttatgcttcggggatcgagcaggccctgtcaccacggcgcgagacgctggtcggggacggcatctcgcttgccgacatctgctttgccgccgagctcgcgctgttcatgaacgagtacgggcggagcgagcaattggacaggcagggattgaccaggatcctgcatcccggggtgcaggatgggtatccgctgatgttcgctcactttgcccggctggtggaacacgcgtattttgcgccggacctcaagccctatgtcgagaagctgcggtcgaaggccgctgcctgaccatgaaacctttggccgcgagcgcggagggatgatcgcatgaccgcacccgtctgtctgatatcaggcgttgggcccggcaccggctcggcgctcgccagaaggttcgccgcgggcggctaccgcgtcgcgctcctcgccaggaatgaaacgcgccttgccgccctcgagcagcagttgccgggcgcaaaagcctatcgatgcgatgtctccgaccccacgcaggtcgagacggtggcctcggccgtggagcacgatctcggcagccccactgtcgtgatccacaatgccgtcggcggcgcgttcggcacgttccgcgagatcgatccggacatcctcaatcgcaacttccaggtcaacacgatgggcctgctgtatctggcgaggcggttcgccccggcgatggtcgacgccggcaagggtgcaatcgtcgcaaccggcaacacgtcggcattgcgtggcaaggccggctttgcggggttcgcgccgaccaaggcggcgcagcggattctcgccgaggcgatggcgcgcgatctggggccgcggggcgtccacgtcgcctatctggtgatcgatgcggtgatcgacctcgaatggacgcggaagcgctggccggagcgaccggacgacttcttcatcaagccgcaggcgattgcggaggaggtctggcacgtcgcccatcaggaccgcagtgcgtggtcgttcaacgtcgagatcaggccgttcggcgaagcctggtaggcgcagcggtcaattcatgagagccaaaggggaattcgatgtcgctcaggaagctcatggtctccgttgcaatgctcgcggcgcttgccgcggctccggcccgcgcccaaaccccgggcatttcggaatcggagatcaaggtcggggcgacattcccgttcagcggcccggcatctccgctcagcaatgtcggcaagggtctcgtcgcctacgtccactccgtcaacgatcgcggcggcgtcaacggccgcaggatcaatctcatcacctatgatgatgcctatacgccacccaaggcggtggagcagacccggaagctgatcgagagcgacgaggtggcgttcctgttcagcccgctcgggacgcccgggatcggcgcgaccatcaaatacgtgaccgcgaagaaggtgccgcatctcttcgtcgtcagcggcgcgaccaagttcacgaacttcaccgagtttccgctgaccaccacgggcttgccgagctacaacaccgaaggaaagatctacgccaaatacatcgcgcagacggcgcccgctgcgaagatcgcgatcctctaccagaacgatgacctcggccgcgatttcgtggccgcattcaaggaagccttgaaggccgatttcgacaagaaggtggtgacatctccctatgaagtcaccgagccaaccatcgagtcccacgtcgtatcgctgaaggcgtcgggcgcgcaggcattcctgatcgccggcaccccgaaattcgcggcgcaggcgatcaagaaggcgagcgagatcggctggatgccgctcaccatcgtcaactacgtgtcgagctcgatctccgcgaccatcgtgccggccggagtggacaaggcggtgggcgtcgtcgtggcgacgatcgtcaaggatccgaatgacaagaagtgggccgacgatcccggcatcaaatggtatcgcgctcacttcgaaaaatatcttgcgggggccgacatcggcgacagcaactatatgttcggcacccagcagggccagattctggagcaggtgctgaagcagtgcggcgacgatctgtcgcgcgagaacatcgtgaagcaggcgcgcaacctcaaggggctcgcgctgccgaccctgatgccgggcatcacgatcaacaccggccccgacaacagcatggcctatacccagcttcagctgcagcgctggactggaagctcctgggaacagttcggcggcgtgcagagcgccggcgcgaactgagctgttgcattgcctgtgcgccagagcacgatccggaaaagcgcgaagcggttttccggaagatcatgctcaaacaacgagctgacgcgccatgaccattcaacccaatctcatcgcgctttagtggagccgtcgtgcgatcggctttgccagcgcgctgtgccagtcccattgcgacgactggtcgctcgaccgcaggcttgccagaaacgccgtggtcttcggctgcacccgcgagccgtcgatcacctcgagctggccgcaccggttgagcgtgtgcagcttgcgcccagtccatagcggtccgggcttgagcacgtgtcgaactgcctgccggtacgtcgcaggcgacagttcgagcacttccgcaagtccgagcgccgcgccatagccgttgctgcagtcctgcaccggccgccacaactttccattgacggtcacgaagttgccggccggccgcgtggtggcgcgatccatcaggatcgggttggccgcatgcggctgccaggggccgagcaattgctcggcgtgatagatcgcaagcgtgtcggaatatccgccgctgccgtcacgccaggccccgaacatgtagtggcggccgtcatgccgggtgatggtcacgtcggcgagctcgagcccggacagcagcgtcgagtggcgctcccacttgtccggaaagcggatgcatttgtagagcggaacgtcccgatgcgcggtgctttccgggatcatccagagctcgccatcgttctcgatcaggaaagggtacgacaggtgccaaggctcttccagcaccggcatcaccttgccgaccggtccgttgccgtcgaactcgatcgcggagatgatgcccttgccggtccggtggtcaaggtcttcgaagaacacgaaggtcctgccctgccatttcaccgggaagggatcggcatagcagcggttgccaggatcggcgagcacgttccaggcaggtcccgacagttcgccggtgcgccagatatccgtggtcccggcgaagcgccaaccgacatgccagtgcggcgcgtagcagcacagacgatagatctccttggcgatcgaggtcgccacgccgcgcaccacaaagggtgcgggatttcgcggcgcgccgccattcgctggagccggcaagtgcggtaccaggcgcggagctcccgacaggatcggcggcagcatcgccagtgtgcgtgccatcaccgtttcgagcccgccgctcaggccggcggcgatttccgcggagggatggccgcggtccagcaccgcgccgtcgcactcattgacgatttcgatcacgggcagatcgccggcgagaatggccgccaatgcggcactttctcccgcgtgtccgttgaaccgcggacggagatacagtccggcggaacaattcggatcccgctcggcgctggtgaagtcgatcaccacgtcggggcgacccgcgcgcggccgctgcgggatcggcttcacccggtcggcgccgccggccttgcccttgcgcaggacgatgcgttcgagctcgaacagcatgtcgaggccggcgggttgcggtgccggcgtcgtggtccaggcgatttgaacgggaatatcctgatcgttgacgcgcagtgaatcacggcacatccagagccgcgcctgctctcgatcgcagcgaaactcgataatcatgtccagcccaacttcctagtatgcgtccactcccacggcattgccgagaatgcggacgtattcctcgatcatggcatccaacgaatagcgcgacttcaggcccacggcgctttgccgcagctggtcgctcaacgaacgatccgtcaggaccttcgacacggcggccgagaattcggcctcgtcggcagcatcgacgaacactgccgcgggctgcccctgataggacagcacttcgcgcagcacggggaggtcgttgacgacgcagggaatgccggcgctcgcggcttcgaccgcggcgaggccgaaggtttcggcctgcgtcggaaagacgaagacgtcgaggcaggccaggaaatcggccatctggcgcggtggaatctcgcctatgaagtggagccggtccgagacatcaagctcgtccgcgagagcccggagccgcccttcgtcggcgccctggccggctagggcaagctgccaggacggatcggcagcgagcaggcgaattgccgcatcgagccgcttgtgcggatgcagccttgctgcacagccgagcaaggtgcggtcggccggcagcttgaattgctgccgcgcgacatctttcggcaggctgtgcgacttgtcgtcgaagccatgcggcacatgcttcatgcgtgaccggtagggagcgggatagcgcgcgtattcacgctccatgtcgcgcgagttcagcgtgatgcactggaagaagccggtcgtgcccatgatgatgtcggcagcgcgcacgggcatgctcatcgacagcgccgaagatacctggttggcgatcaccggggcgcggctgacgagccgcgacacgccgccgccgatcacattgccgaagtgctggaatgtcagcacgacgtccggattgatggtcctgagatgaccggcgagcatccacagcatgcgcagcagcgccaggggatttccgggccgggtttgcgcgcaatagaacgtgttgggcggctcgtcgaagcagtcggatttgcggaagaagaacaggttggcgacgtcatagccacgcgcggtgaggccggcgccgagcagccgcgagatctcctgcgcgccggcgttctcggcctgggtctgcaccaggacgacacggagcttcggcttgctctcgttcggtcgaccgcctgatgcgctcgatgcctcgcgcaattctgtgcttggcgtgtattggagcacggattcctcacccgtcgagggcgtggattcgtctcccccattcgtgcgcgcgtaactatcacgcgaagcgtgcgcgtgcaccgaatagcgcgttttgaggttactgctcatttagcaatcagacatgtgtcagcaatcgagagccatggtcccacacaggatacagccggctcgttaactaattggttacggcagcgcagagatgggtaaccggcgattaaccatagatatccacgttggtgcagcacagagcagtgctgtcagttgaattcgagtcggagcccatgaagttcggtagccgcgcaggcccgagacgttccgaagtcatggaacccgcagcgtcgtgggaaactgccgacgctcagtcttagtcgttacggtccgcaacgcggacggcgtaggtgttgcctttcgacgacgatggatgcgacagcaccagaacggacggatcgacgccggtccgccggcggcacagcacgttgagcgcgatggtggcgagcaccagcgaggccgtcgccgagatcgcggcaccgagcacgccgagccaggggatcagcacgacaaatcccaccagccgcaatgcgacgttggcggcgaccaccggcacgtaatcgcgctcatgcccggtcagttgcaggaccgcggccgacggaccgcctgccgcctggaacgccgtcccgatcgcgagcacgatcaacacccactgctgcgcggcgaaatgcggcccgaacaggccgagaaggtggggcgcagcgacccagacgatgacgagcccgctgagcacgcagagcgcggtgacctcggccatcagcttcagcgtatgttcgagctcgcggtgattcttgctgaaatacagcgacggcagccggcgcgcgccgaatgtgtagagcgcagccgacagcatggcgaagatgttcgccaggcgcgaggcggcgaaatagacgccagcagtcgccggatccagcatccagtagaccaggatgacgtcgaaatactggttcgccgcttcgagaatggatgcgagccagaaccggaacgcactgcgattccaacgcgagctctcgaagcgcgccgtgaccgtgcgcaggttcggcagcacgcgcatgatcgacacgatctgcacgatcagcccgatggccatcgcgacggtcatcgccgtgaacagttcgacggggctgagctgccggtgaccgaacagcgccgcgatcaggaccaggacgacggcaacccgccagaagaactcgcgattgccttcgcccatcagaatgctgaccagggatcgcgcgatctggctgccgagcatgagcccggcattgacggcggtgaacgccgagaccgagaggatcagcaaccaccattcgccgcgaacggttgccaccgcggcgatcgcggcgatcgagatcagcatcccgatcgccgagttcttcaggctcgacagcagcacacccttggtgagctcggtctggccgcgcacctcatattcattgaggaagcgaaccagcagcagctcctggccgaccagtcccgcgaccgaggcgatctgggcgatcgagagcaaggttgcgaagtccccgaacgcgtcgggtgtcatcgtccgcgcggccagcgagaacaaggcgaacgcgagcccgccgctgccgaccttgagcaggatggtcccggcaacgccgcgcgtgacatcgcgccgtagcatttggagcacagaggcaatcaccagagacgtctcaatatcctgtcaggccgctgaccgtagcaatcggtgaggtcaggagtgttaatgttctcttgctaaaattccgttcctctcgacggcccgcgttccaggcagtcctgaaccgggccaatatgtcgcgctgctccattctggaacgtcgctgttcttcgccgtccccaaacggcgcaggtcggatcgggatccgcagcaggtcctgccgcgcgcgcggcgcggatcgaagccgcgctggtgcgtcaacggcacccgtcgaagctccacggccaggcaattgtcccgccagcgcgcagcggagcctccaaagggtcggtttcatgatcactctcggtgcaagctatgtgccgcgacctcgttgatcgcaatccggtcttttcgttaacctcaacaacagaacgcatcatgctcgaccggtggtgtggcatggcaggcaaggaagttgcagttccatggcctattagccgtcggagcggacaaagatgattgccgaggaaggcaccaaccagccgatcgcggcctgcgaggctgaaatgaacgaaacggacgttgccattgttggtgccggtttggcgggctcgctggcgcgggctgtcctctcgagggccgggtatcgggtcgtcctgatcgacaagcgctcgatcccgccggacgaattccgtgtcgagaaggtcgcgggacggcagatcgatatcttccgccgcctgggcttcctgggcgatgtcgaggccgtcgcctcgtcctatgaccgggtgctcaacatcaggggcggccgactggtcgatgtcggtgtcgggcgctcctacggggtttcctatgccgacctcgtcaacatggcgcgcggcctgacgccggagccgtccaccttcctgcttgaccaggtgaccgacgtcagctgtagcgaggatcgccagcagctgacgctggcctccggaaagcgcgtggtctcgcggctggtcgttctggcgaccggcatggccggcgtgcttggctacaacctcggaatgcgccgccgaatgattgccgcgcgtcattccgtcaccttcggcttcaccatcgcgcggccggataacgcgccgttcggcttcgatgcgctgacctgctacggcaaggaggcggccgacggcgtcgactatctcagcctgtttccgatgtcgggcgggatgcgggcgaacctgttcatgttccgcgatccgactgatccgatcatgcgcgagctgcgccgcgacaccgcgcggacgctgcttcgcctgatgccgggattgcagcgctatctcggcgatttcaagatccgcggttcggtgcacaactgggtcatggacctgtcagtgaccgaggggcatctgcagccgggcatcgtgctgatcggcgatgccttccagaccaactgtccggcggccggaaccggcgtcagccgcctgctggtcgatgtcgagcgtctctgcaacgaatatgtgccgcgctggctcgagaccgacggcatgggcacggaaaagatcgcgcagttctatgccgatcgggacaagctcgccgccgaccggcactcgctgcagctggcgcgctttcgcgaggccttgacctcgaacaccgatgtgcgctggaccatgcagcggaagctgcacttcctgcgccgcatgatcacccatcgggtggaccggattcatccgggatgggtgatgcgcgtgcgcagcgcgctgcattaaagcgtgatccggaaaagtgcgaagcggttttccgaaagatcacgcttaaacaagaatctaaagcgcgatgacgaccaacatgatcgcatcgcgctttagggcggcgcgcgcgtctctattcagaaccgaaatgcgttagcgcgtgccggtcgaggtgcggatcggccggagatcggtcacgcgcttggcggcctgcttgatccagggcgcctgcttcagggcgaacaacgccagcgagccggccgcgctgccggcctgtgtcacactcgacatcggcgtcggctggcctccgagctgcatcttgtagggttcgtcgccgatggtgaaatccagcacccggtctccgcgctcaatgcaatccttggcgacacgttcgaaggtcagcgcgccgatcgactggctcttgtatcgctcgatgtcgaacgccgtcatgacgacgaggaggctgccgcggtggaccagtccgagggcggtggcgatgacgttgccgtccattttcatggcatagagccgcgtaaacgagcccatgccgcgaagcgccacgctcgagtagaattcgaaatactccggtcgctgcagcaggtcgccgtcaccgcgggcccgaaaccgcggaccgcgaaacttccgcatgacgtccatggcctcgccgattgaggcgctgtcgtcgcagcatgtgaaggtgaccgtgcccttcttgtggatctggcgccacttcttggccagctccttttgatagggctttcccaacgcattgatctgccattgctcgaacggggcgaccagaaccgtcgcataggcgttcgtatccatcaggctgcggtgaggcgctccgagcaaattctcgatcggcattcgggcatcgagcagcttgggtatgcggagcaggtcgaacggccggaccagcttgcggagcgtctcgcaggcctgccggtcctgcagcagatcggtgaatgtcttggtggcgcagactggagacagatagtccgacacgcgaaggtccgcgaactcgatcgtgcgcatcggcccgcgccgcacccgcagcaacggcagcacggctgcgagcgccttgctggcgcgatgacggacgacgacgaccagcggcttcgctgccgcggcgggagctagcttgcggtagaggctgtccaaccaaagcggatgctggaaggcggtcgcgtccgagccttcaaacaatgtcgcgtattcttcagacaggaagtcgaatgcgtcgtcgatgcagacatcgaacgcgtcatcattcttgttcatgtgaaaccagtaaacggcaccttaaaaagcgccggtcaagccggcgcaccgccatcatagcaaaggccgatgacctcgggcaccggtagaatatgatttgtattaatgcagtgcctcgacctttgcttgttgttgctggtcgggcgtcgctggcctcgcggaagcatcaagtgtgatgtcgccgccgccgagcccggcggcctgcatcgttaacaatccgtttacggtccgtcctgaatcaatctgccgcgggatatcatgcgtcgtctggaccggatattgcagttgggggcgcgtaagtcctcgagccactggtgaaatgttgagtcactgccaaaaagcgcgcgtttcctgcgccatcccgccctcgcatgccgatcgcgagccggctcggcgccccgattcggacatggctgcttcggctgtcccgatttgcaacacttcgcgcagcgaacaaccggtatctgcggcgggtgtgccagccggatctgcgacgccgaacagcatgctggagcgtcgcaccaatcccgtcggccgggctgcgaccgccggcgttccgcgggcaaccgtcggcgggctgcgtcttgccgtgctcgatcgcgagcagactgcggacttcatgatcgaggcggtgtatccgaaccggcggatcgaccgcccgctgtacctgacctcggccaatggcgaggtgctgtcgcgctgctcgaccgagccgatgaccgaccgcctgttccgtgccgccgacctgatcaatgccgatggccagccgctggtcatggtgtcgaagctgcggtcgccaaacccgcttcccgagcgcgtcgcgaccacggatctgttccacgacgtcgcgcgcaaggcggaagagctcgggctgaccttctatctgttcggggcgaatgacgccgaaaacaaatcggcgatcgccaatgtccgccgcgcctatccggccctcaagatcgtcggccattcccacggctatctgcgcggcgatgcgctgcgggccaaggtggacgaaatcaacgcgctggcgccggacttcctctgggtcgcgctcggcgtgccctatgaacaggccttcgtcgacgagttcatgccgcggcttggcaatgtcggcgtcatcaagacctcgggcggattgttcaacttcctgtccggatcgcgaccccgcgcgccgagatggatgcagatcgtcggtctcgaatgggcctggcgtctttggctcgagccgcgccggctgttctggcgctatctgaccacaaatccccacgctctctatcttcttttcaaccgcacccggtcctcgtcgaccagggactgaaacacataccgcgtgcattctgcgctccggcccgatccaccccccagcgcaagcccgtccgatgagcggagtgcaaccgacgggccgcggcctcgaagcgcggaacgaaacggccgggcgtgggtcttttggcaattcgaccaccggcagcgctggaaggaagacatcctctgcgcgatcactccaccggtccgccaggccctttcgctcgcgacgcatgcagatcgcgctgcgcgccagtcttgtctgagccctgccttgcctgacatgatcggaggaataatagttcctccgcacgggcaaacaaggaaccgacggcgttgccggacattgcaagcaaagacgagttcgatgtcacgcgtgcagcctttgccgcgaccatcggcaacatgctggagttctacgacttcatcacctacagtttctttgcgaccgagatcgggcacacgttctttcccgcgcaaagtgagtatggcagcctgatgctgtcgcttgcgaccttcggcgccggtttcctgacgcggccgatcggcggcatcgtgctcggcgtcttctccgaccgggtcggccgacggccggcgatgttgctgagtttcgccttgatgggcggagcgatcctgaccatcgcgctgacgccgtcctatgccgcgatcggcatcgtggcgccgatcatcgtgatcctggcgcggatggtgcaggggttcgcgctcggcggcgaggtcggaccgaccacggcctatctcatcgagatcgcagcgccgaggaatcgcggcctggtggtggcatggcagcccgcgagccaggaggtcgcggcgacgatcggcgctcttgtcggtgtcatcctgagcagcacgatggcgcccgacgcgctgcaggcttacggatggcgggtcgcattcctgctcggggcggtctgcctgccgttcggcatctggatgcgccgtacgctgccggaaacggttccccacggcgagcgcgccggcgctgatgtcgagagctcgaaccatgtcgcgttggcgcgccggcactttcgcgtgatcgtgctggcgctgatgatcctcgccagcggcacgatctcgacctacgtgacgcagtacatgacgacctacgccaagaacacgctgcatgtgccgccgtcgctggcgttcaccgtgtcgctggtgagcaacggacttcagatcatcggtgcggtgctcggcggctggctcgcggaccggctggggcgcaagccgatcatgatctggccgcaactggtcgtgctggtgctgacctatccggccttcctgtggatcgtccgggatcccggcgcggggtcgctgctgttcggcttcggcctcctatcgttcatcggatcgctgccgttcacggcgttctatgccgccttcaccgaagcgctgccgcagaacattcgcggcggcgtgttcgccacgatctacgcggtcgcgatcgcgacgttcggcggtaccgcgcagctcgtggtcacgtggctgctgcacgtaaccggcgatcccttggcgccgtcctggtatctcttgctcgcggctgcggtcggcatcgtggcgatgagcctgatgcccgagaccgcgccggtaaaggtcggcgacaagtaatgccgggttgatctagtccatgtcgcggaaggcgtggcctttggcctcgatctccttcacgagctgcgccggcagattggcctgcccgaagctgccgtcgaaaacccagtccttggcatcaccgagatcaggaaggccggcgcccttgcggacgtagagaccgaccgatgccttcttcggattgatgtagagatcgtagtccattgcgcgcctcctctccgttgaagttcaacggaagttccagcggcagccggagcttcctggagtgaacgccgacaaggctaggcgggtttcttcgcctccggcgccagcaccaccgacgcttcgctcgtcagcatcaggaacgtgatggtctcctggaaatagagctggaccgcggtcgctgagtggctgagatagccgatcgacaggtcctggccgatcgagagctggaaatcgccgccgcgggtggtgagcaggacaccgccctcgatcgcgggcgcccagatgatcttgccgtcgaccagccgctggatgtgctgcagcaccggatagccgtcgtcggtggcgccgccgatcgcggtatagggctcggtgccgagcagcagcgtgtaggggccgttgacgccggcgagccgcaactggctcaccgcctgcgcgaccacattggggtagttcttgacgctcgccggcagcgtcagcaccgggttgctggtgccctggcggatgccctggatgccggcggcggcgtagccgtcgaacaccgcgcgatcttcggcgaaggcgatcttgcgtgccgcttgcttcagcgggtcccagtcggaatcattcgcgccgcgctcgacatcatcgatcgcctggcgtgacagctcgaaaggcacgcgcagctcgaccagcgcgcggacctcgcgctgcgtcgcctcgaccccgtcgccgggcgtcgcaatcttcttgagatggccggtgccgaccgcggagaaatccgtccccttcggaccgtcgacgtcgacgacacggcgcgccgccaggtggcgcttcaacgtgcgcgaggcttcctcttcgatctgggcccatgccgcgtcggagatgggggccagtccccgatgaagattattcatgtccagcgtctcctttcagtgagccgatgccgagcgagccgtcggccggcgttattcttggtgcaggcgcctcgtcggccccggcgtcgtccagcgatggttcagcggcggcaggcgcgtcgacggtgacatcctccaggaaggtcgccgacgggacgaagtacagcgtgccggtaacggcacggctgaagtcgagcaggcggtcgtaattgcccggcggcttgccgacgaacatgttctccagcatctgctcgatccggtgcggggacttggcgtagccgatgaaataggtgccgaactcgccctcgctgacattgccgaacggcatgttgtcgcgcacgatgtcgagctcctcgccgttctcgacgatcgtcgtcagcgcattgtgggcatagctcggcttcaccgcatcgtcgagctcgatatcggacagcttggtgcggccgatgatcttctcctgcatctcgaccggcagttcgttccacttcttcaggtcgtgcaggtatttttgcacgatcacatagctgccgccggcgaacgccgcgtcctcgtcgccgatgatggtggcgtcggtggctgcctgatcttcggggttctcggtgccgtcgacaaagccgagcaggtcgcgctcgtcgaaatatttgaagccgtgcacctcgtccgacgtggcgacggcatcgccgagccgtgacatgatttgtgtcgcgagctcgaagcacagatccatcggcacggcgcggatgtgaaacagcaaatcgccgggcgttgcgacggcgtggtggacgccgttgatctcgcggaacggatgcagacctttcggcttcggcgcgccgaacaaccggtcccatgcatcggagccgatccccatgacgcaggacagccggccctcgagatcgcggaagccgaccgcgcgcaccagcgcggccacatcggcgcacagcgaccgtaccaccgcatcatattccggatcgggcttgatcgtgaccgcaaggaagatggccgcgcgcgtcagcttcgcagcgaccggttgcggaacggctgatggcacgcaagtctcctcaactagaacggcacgtcacggcgacgaaaggcgggccggacgcccgatcggcgtccagatacatggcagaggagcatgccatcggaacctttacaagagcccgattgctaggcttccgcggatggaccaaccggcttgccggacttctcttcctcgagggtcactgcaatggcggcattggccgagagccgcaccttggagccttcgacaccggcgacgaagccgagctcgatatagtggtgatgacccttgtggaaaccgtcgctctcgctcttcttgagcttgatgcggttgccttcgacgcgatcgacggtaccgacatgcacgccatcggcgccgatgacctccatgttgtccttgatgttctgcgtcatggcgctctccctggttgaagctcagtctgcatatgatgcgcccagacgacgcggcgatgacagcgcgtcgtcggcaatccgggcctgcttcacaccggctcgaattcgtcggccgccgcgttctctggcttcctgccgttgaaggtgaggccggccttggtggcggaaagcttgacctgcgagccgtcgcgcacgtcgccggcgaggatcatctcggcgagcggatcctgcacgctgcgctggatcacccgcttcagtgggcgggcaccataggcaggatcccagcctttctccgccagccagtcgcgggccttcgggtcgagttcgaggtcgatcttgcgatcctccagcagcttgcgcaggcgcgcaaactggatctcgacgatgcggcccatgtcgctcttctgcagccggtggaacaggatgatctcgtcgatgcggttgaggaattcggggcggaaatgcgcccgcaccatgttcatcacctgctcgcgcaccgcgccggtgccctggccttccggctggttgacgaggtattcggcgccgatattcgaggtcatgatgatcagcgtgttgcggaaatcgacggtgcggccctggccgtcggtcagacgcccgtcgtcaagcacctgcagcagcacattgaagacatccggatgcgccttctcgatctcgtcgaacagcaccacctggtagggccgccgccgcacggcttcggtcagggcgccaccctcgtcgtagccgacatagccgggcggggcgccgatcagccgcgagaccgagtgtttctccatgtattcggacatgtcgaggcggatcatcgcggtctcgtcgtcgaacagatattcggcgagcgcctttgcaagctcggtcttgccgacgccggttgggcctaagaacatgaacgagccgatcggccggttcgggtcctgcaatccggcgcgcgcgcggcgcaccgcggtcgacaccgcacgcaccgcctcggcctggccgacgacgcgcttgccgagcatctcctccatgcgcagcagcttgtccttctcgccttccagcatcttatcgaccggaacgccggtccagcgcgacaccacagccgcgatattgtccgcggtcacggtttcgctggcggacgaggtctcgctggcctcgaccgccgcgagcttcttctcaagctcgggaatgcggccataggccagctcgcccgccttctggaattcgcccttgcgctgcgcgttggcgagctcggtacgcagctgctcgagctcacccttcatcttctgcgcatcggagagcttgctcttctccaagcgccatcgcgacgtcatgtccgccgatttcttctcgaggtccacgagatccttctcgagcgtctgcagccggctcctggagccgagatcggtctccttcttgagcgcctcctgctcgatcttgagccggatgatctcgcggtcgagcgagtcgagttcctcgggcttggaatcgacctgcatcttcagccgtgccgcggcctcgtccatcaggtcgatcgccttgtcggtcttgccgacaccgggctcgccgatcaggacg

SEQ ID NO: 16 - DNA, 159128 bp, Bradyrhizobium enterica
  misc_feature (17594)..(17603): n is a, c, g, or t
tgcgcgacatcgggccggcaatgcaaggcgtcggcagtgacaagagcgccgtccagatcgagcgaggcgaggacttcgagaacgccggcaacctcgttgcgattgggggccttcctttgagccagcgccatgcgtgtgcctgccgcccagacattgaccatatgcagcggtgtggattgccgcccacgcatgaaggcgccgcgcaacgccttgccgtcgatgctgaccacgcccttgatgccgaagcccttgctgagcttgcgcaaaatcgcttccaaccccttcgggtccagagcacggaagacgttgctgaacgtatcgtggctggggatgccggatctgagctccaggaaccgctgcaacagctcctctcggcctttgccgaagaactcgaactcggtgcaggtcttggcgccggccagtgtcgccgccaaggcgatgacgatgatctccaccagatcgtgccgcacgttgctggcgcgggggtccttgagtggtcgaagcaggcgcttgagttggcgcattctggtctccctcgggaagcgagagacacccaaagaatccagttccaaccgcttggcaacacccctccatcgccatatgcgattcccctaccccgcaaggggggagggagccggacgagtgtgcttaccttacgtggcggggcacgagcgcgagaaaaacgccgccgcttttcacgtcctacttcgccttcttctccgccgcgccgcccttgccttcggcttccagcgccgcgcggatgtgcttgaactcgctcagatcggccttgccgaccacggggaatttcagatcgagccggtcgagcgcgctcacgatggtcgagccgatcacggcacgggcgaaccatttgtggtcggccggcacgatgtgccagggcgcgtccctggtcgcggtgtggtggatcatgtcctggtaggcggcctggtatttggcccaaagctgccgctcggaaatgtcggccatcgagaacttccagtacttggccggctcctcgagccggtcgaggaagcgccggcgctgctcctccttggagacgtgcaggaagaacttcaggatcatggtgccgttgcgcgacagatagcgctcgatcgcggagatgtcctcgaagcgctcgcgccagatgttcttggtcaccagcttcttcggtatcttctgcttgtccagcacctcgggatgcacccgcaccacgaggcactcctcataataggagcgattgaagatgccgatgcggccccgctccggcagcgcgatcatcgcgcgccacatgtagtcgtggtcgagctcgcgggtcgagggctgcttgaaggaggagacctcgcagccctgcggattgacgccctcgaacacgctcttgatcgctgaatccttgccggcggcatccatgccctggaagatcagcaacagcgaccagcggtcctgggcgtagagcttctcctggaaatcgttgagccgcttgcggttggcctcgatgatcttgccgccggcgtccttgtcgatgccgcccttctcggcggtcgggtacgacttgaggtgaaattcgccactcccgtcgaaacggaacggcgcaacgaagggtttcagttcatcggcgagcgatggggacggtttgttgttcatgacctctcggcggcttgcgtggcgatttgatccggtcgatcacgctaccaagaatgcccttgggcaggaagatgatgaacagcaccagcaggacgccatagaccaggttgtcccagccgaccgccttggtgccgaacgagatccgcagcacctcggccagcacgatggtgatgacggcgccgaccgtcggcccgagcgcgacatagacgccgccgacgatcgccgcgaacaccatctgcagggagaccgcaatcccgctcaccgtgtcgggcgagatgaacatctggtactggcaatacagcgcccccgaaagcgcggtcatcagcgcgctgatcagcgtgatcttgagcttttcggcggtgacattgacgccggccgcggcagccgcgtcctcatcctccgagatcgcctccatggcgtggcggatcatgctgcggtcgatcgcgcgccagatcacgaggccgaaggcccagaccgcaagcgcgatcaggtaccaggtgatcttgtcgtcgaattgcagcgcgaacagccccttgccgctcggcgcgcgttgcggcgtgtagccgagcgagccgccggtataatcgcgggtcgcggtgatgacctgcaacacgatgcccgacagcgcgagcgtcaccagcacgaaatagtgccccgtgatgcggaagcggaagcagggataggcgacgacgagcgcgagcccgcccgcggtcgccatgctcaggggaatcccgatccagggcgacagcccgagatggttccagagcaacgcggtgacataggcgccgatccccatgaagccgccatggccgagcgagaccaggccgaagcggcccatgatcgaccacgaggtgtaggcgaacgaccagatcaggatcagcaccaggagatgcaaatgatagggatcgcggtgcacgaagggcagcgcgacgagcacgaggagtgcaatgatccagccggcagcctgcctgctcacgagcgcctcgcgagcaggcccgcaggccggatgaacatcatgacgatgaagaaggcgaaggccagcacgtagccccattcgagatcggagaacaggccgccgagcgagatgatctcggcgaacacgaaggcggcgacgaacccgccgatgaaattgccgaggccgccgagcacgcagatcaggaaggtgatcggcccgaacgacaggccgacgaacggatgcacgtcgtattgcagcaccagaaggcaggccgcgaggccggcgagcccgccgccgatcgccgaggtgacgagatagatgcgcttgggatcgacgcccatcagtggcatgatctgacggtcctgtgcgatggcgcggatcgcggtgccggtgaaggtgcgggtcaggaacagatagacgccgatcatgccggccagcgccgcggcaaacgacagcagccgggcgtagctgaaattcatctcgccgagcgccagcaccggcaggcggatgccgagattcttgaagtcgatgccgaaggcgacggtggcaaagctttgcaggatgaacagcacgccgccggtggcgagcagctggttgatcggcggcgcggtcagcaagggcgcaatgacgaggaaatgcagcgcggcgccgagcaacgccaccaagaggatgacgagcggcgcggcggcccagtatggcagatggaacacctgtacgagatagtacatgccgtacatcccgatcatcacgagctccgcatagcagatccaggtgacgtcgatgacgccgaagatgaggttgagcccgagcgcgagcagcgccagcacgccgccgagcagaatgccgttgatgacggcctccagcaggtagatgtcgaagatgtcgaggaaggattgcatggctgcctctctcttacctctccccgtcggggagaggtcggcgcggagcgccgggtgagggcaacaggtcccacgagagagcgtgccccctcacccggatcgcatctggcgatgcgatccgacctctcccacagggggagaggtgaaccgccgatgccgcaacactttccgatattgtcagcacgtcctacacccccaaatacgcctgcttgatggtgtcacttgccgcgagttccgccgccgtgccggcggcgcggatcgtgccggcctccagcagataggcgcggtcgaccacgcgcagcacctgctgcacgttctgctcgacgatcaacaccgtcagccctgcggcgcggatgcgcttgaccagctcgaacacctgctgcaccacgaccggcgcgaggccggccgacggctcgtcgagcagcagcagtttcgggttcgacatcagcgcgcggccgatcgcgcacatctgctgctcgccgcccgacatggtgccggccatctgctgcaggcgctccttgaggcgcgggaacagctcgaacacgaagtcgagccgctcggcgtaatgcgcgcgggcgccttgcatgtaggcgcccatcttcagattgtcggccaccgtgagccgcggaaacagccggcgattttcaggcacatgcgcgatgccgagactgacgatgcgatgcgcaggcgtcgcgacgacgtcggtgccctgcatcgtgatggagcccctgaccgggcggatcaggccggagatcacgcgcatcagggtggtcttgccggcgccgttcgggccgatcacgccgaccgcctcgcccgccctgacgtcaaggttgacgtcgaacaaagcctggaagctgccatagcccgcatcgatcgatttcagctccagcatgcggctcacgccccgatccggcggcgcgcctgcgccgcggccgccgccgcaaggctcgcatccgcatcggtgccgagatagacctcgatcacgcgggcatcgccggcgatgtcggccggcaggccttcggcgatcttctcgccgtgatcgagcaccatgacgcggtcgaccacgcgcatcaacacgcccatgatgtgctcgacccagatgatggtgatgccgagctcgtcgcggatccggcgcagcatgtcggcagcctggtccatctcggcctcgtcgagcccgccgagactttcgtcggcgagcaggagtttcggcccagtggcgagcgcctttgccagctcgagcttcttcaggccggcggcgcccagaccctcgacgctgctgtgccgatcggtcggcaggccgaccatcgcaagcgcccgctcggccgccgcctccgccttgctgcggctgtggcggccctggccgtagaagccggcgagcgcgacattctcgaaaatgctgaggcgatggaacggccgcgggatctggaaggtacggccgatgccgccgacgatgatccggtgcggcgcgagccccgcgatctcgcggccgtcgaacaggatcgagcccgaggtcggcggcaaggtgcccgacagcatgttgaagatcgtgctcttgcccgaaccgttcgggccgatcaggccgaggatctcgccctgctcgacgcggaacgacacgttgttgacggctcgaaagccgccaaaccgcttgaccaggccttcgacggcgagcacggcgatccctttcgcagcgcgatgagccggcgcctatcggcgatgccgacgtgtcgcaacacgccgacgcgcagccttggtgacccgcatgaatccctcccggagattgtgcactgcattttttgttgtcttgccgccctatcacagggggagcggcggatgatgtcaagcgcgatggctgcggacgtacggcgccaggtgcttacgtacagagccgcatccaccttgccctcccgggcaagcacgcgcgatccgctgtcgggatggcggacttccgttcaataatgccgtggaggtcgagatgatcgttgaagcggccgagtgatcaccattactccgacaattgcgtctcgatgaacgcggtgacgaagcgcggcattgccgcggtgagatcggcgcggctgcgcaccagatggatgccgacaagctcgggattttcctggcgtgcgaggttggactcgatctttgtccgcagcgcgtcagcaggcatgtcgacgcgcagaatccgcatcatcgcgagcgcaaccccggtgtagatgcagtgccagtcggcgtcgccgcggcaatccgacggcttgagcccggtctcctcctcgagctcgcgcatcacgctgccggcgatatccaccgtctcgcccctgatgtcgtcgagatcgggcgtaccggagggaaaatagatccgtccggcattcgcagtccgctcgcccatcaccccgcacacgaaggcgccgtcgctcgagagcagcgcgcccatgccgaagccgttgaagacctccttgtccggaaagccccaatcacgccaggcgaggaagcttgcgaagtcggtctcgaaatagctcgcgctgagccgctcaccggcaaacaccggatcgcgcccgagcaggacgcggccgttccacaggttcgggttcagccgctgctgctcggcgaaatgcgtgtcgatctcggcgcgccgctggtccgcgaacggccagggacgccgctgcagcgcgaggtccagcgcggtgacgcggcaaatcagcggagactgcatgtcgctcaccacgcactcattccggcatgatcttcgtgcaaattacttcgcgcttccggtcgtcttcttcacctgatcgacgaacctgttggtgtaggtcttggtgacgtcgatgccggccttcgcgacctcgggcgagccctcgctgaacaccgcgagaacggcttcggcgcccttcgggtccatcttgccggtttccgagtacatcgggatcgtgttcttcagcgcggccagatattgctccttgttcttgccgacgaggtcttccggcatcttggccatgatgtcttcggcggaatgcgagtggatccagccgagcgtcgccatgatcgcattggtcaacgcctgcacttccttctcatggccgttgacccaggcggtggtcgaatagagcgcgccgcccggatactcgccgccgaacaccgcaagcgtgtcgtgctgggtgcgggtgtcgctgaggatcttgaggtccttgtagctgccttgcagcaccgtgacggagggatcgagcatcacggcggcgtcgatctggccctgctccatcgcggccaccgcggtggcgccgaggccgacgccgatcacggcggtgccggccggatcgaggccgttcttcttcaacagatatttcaggaagaagtcggtcgaggagcccggcgcgctgacgccgaccttcttgccgacgagatccttaaccgagctgatctcgccggtgtgcttcggtgacacgaccagcacgaggccgggatagcggtcatagaccacgaaggcctgcatctcctgcttcttggcggcaatattgacgcaatggtcgaaatagccggagacgacgtcggcgctgccgccgagcacggccttcagcgcgtccgagccacccttgaggtcgaccagttcgaccgcaagcccggccttgtcatattcgccaagctgcttggccagcacggtgggcaggtagcacaggcaggcgccgcccccgaccgcgatggtgatcttgctttgcgccgcggcaaggcccgtggacagggtcagcgccagcagcgttccggcaagtgtgccaagcagtttcttcatgacgtcctccgttcgattggccggcaagatagaggagcaggcgcgccttgagaaggcgactttccaggtgctggccaagcctgtggccacggcatagcatcgcgaaatacaggagaacaccaagaatacttcaaggaaacaccaagggaggccttcatgaatcgcattgcaaccgcgctgtcgctcgccaccgccttcgccgccggctgtggcgtcatccatctgctgcggccggcgctcgcggccgagagcatcaccgcgcaaatcatccacaccggcgagatggagggcgacaagctcggcgacgccaacaagacgggcttccgctccaggacgttcgtttccgccgacggcgccaccgtctcgatccaggacggcaatgtgccgaagcacatgcatcccaacaccaacgagatgcagttcatcctcgagggcaccggcacggtctggctcggcgacaaggaagtgccggtgaagccgggcgacctgatcgtgatcccgaaaggcaccccgcatggcggcaccaagccgaacggccgcccgttcaaggcgatcgcgatcaagacgccgccgcaggcgcctgacgataccaagctgctggattgagaacggcggtctttctaccgtcattgcgaggaacggatttcctgccgaacttgtgaccgtcaccctgaggagaccgcggagcggccgtctcgaagggtcgacggcccgactgtgggccgtccatccttcgagacgcgcgttccgcgctcctccagcgacaaaggcgaagcctttgcgcggggatgacgtagctcacttcgttggcggtgcatgagcgtcatccgggctcttgcaaatctcgtcgctttcaggatgcagttccattgcatgacgatcgacagataattcacttgcctcgcctctcgccactccataatatgacgattgtcatttcatggagatcaggaccatgagcctggatgatcaccccacggtcagggccgtgcgtgcgcgcagcagccaaccggtctacgacgccccggtgtcttcggacctgctcaagcggatcgcgcgggaatgcggcgccgacgatgtcggcatcatcgagttcgaccgcgctgcgatcgcgccgcagcgcgacttcatccgcaaggtctatggccggacgcgttccctgctcgcgatcgcctgccacatgaaccgcgagccggtgcgctcgccgtcgcgttcggtcgccaacgaggaattccactcgacctacgatcacgtcaacgagaccgcccgcgccatcgttcgcgcgctcgacgagcacggtatcccggcctgcaattcagtcgccgctttcccgatggagatggacctgccgaggatcatgatggtccagcacaagccgatcgcggtcgaagccgggctcggccggatgggaatccatcgcagcgtgattcacccgaaattcggcagcttcgtgctgctcggcaccgtgctgctcggctgcgaggtcgacgcctacgaccagcaaatcgactacaatccgtgcctggaatgcaaactgtgcgtcgccgcctgtccggtcggcgccatcaagccggacggcggcttcgatttcctgtcctgccacacccacaattatcacgacttcctcggcaacttcacgcagtgggtcgagaaggtcgcggacgcaaaggatgccagggattatcgcgcccgcgtgccgcgcaccgagacgctcaacatctggcaatcgctgtcgttcaagccgggctacaaggcggcctattgcatctcggcgtgcccggccggcgaagacgtgatcggccccttcctcagcgatcgcgacgcgcatttttccgacgtggtgcagccgctgatcgacaaggacgagttcgtctacgtgatcccggataccgacgccgaggacaccgtgacgcggcgctttccgcacaagaagatgcagcatgtcagctccggccgccataccggcagcatccaggcctacatcttctcgctgtcgctcggattccagcgcggccgggcgcggggcctcgatttcgtgacgcatctgcgcttcaccggggcgagcgcgctcgacatgacggtcgcgatcaagggccgggatctgcaggtggtgccgggacgtcacgtcggagaggcggccttgagcatcaccgccgacacccaggcatggctgcgcgtgcagaaccgcgacctcgatcttgcagaggcgatcgacgcaggcctggtgagccacagcgatgaaaagctgttcgcggcctatatgcggtgcttcccgctctgagcctgctcacaccagcaggccaccgccatccactgcaagaacctgcccggtcacgtagctgttcagcatcacatagacataggtggtagccgcctcgtccggcgatgcggcgcgcggcagcggcaggcctgccacataaccgcgcacccgctcctccggcatctgcctgacgcgctcggtgaggatgagcccggggcacaccgcattgacgcggaccggcgcgagatcgacggcaaggccgcgggccaggctctccatcgcgcccgcagccgcggtcacgaacggcatgcccttctgcgggcgatgggccagcaggccgccggtcagcgtgatcgatccgttcgcggcgatcgcacggctggcgtgcttgaccgccgcaagcgagccccagaagcggagggcgagagcttcccgcgcaaccgcgagatcgagatcgcgcactgtgccgaacgcaggcaggccctgatcgcccgccgtgatcgcgaggtgatcgaagccgccgacctgatcgaagaagcgcgacacgccggcttcgtcgcgcagatcgacggcgctgcccgatgttcccggcagccgcgcgaccgccgcatcgacgttggcctgattgctggaggcgatcaccacgtccgccccctgctgctgcgcgagcgcggcgacggcaaagccgatcccggacgatcccccgatcgcgatcacgcgcttgccggcaagcgacattgcgttggtcatggtctcgtctccggcgctacagcgcaaaataggcgggatgatccatgtcggcgagcagcccgggctgctgcggctgccagtcgagccgcgcacgcgtccgcgcactggaggccggcatgtcggcgccggtaaaccggccgaggaaaccgaaatgctccagtgcctcctccggcgacttcgacaccagcggaatgtccaggcgccgcgcgatcacctcggcgatcgccttgaacggcacgccctcgtcggcgatggcatggaagggaccgccttcgacgccgcgctcgagcgcgagacgatagagccgggccgcatcgaggcgatgcacgcccggccagcgattgagcccttcgccgacataggccgagacgcccttgtcgcgcgcaatcgcgatgaggcgcggcacgaagccgtgatcgccatggccatgcaccgacggcgccagccggaccacgccggcgcgcacgccgcgcgccgcaaccgcggtcgtggccgcttcggtcatgcgcggcaaagcgggcgacggcggatgcggcgcgtccgcctcggtggcgacgcggccctgcgccacggtcgcgacaccagacgtcgtgatcagctgccggtttgatccctcaagcacggcgccgaacgtctcgatcgcacgccggtcatcctcggagttctgcgcgaatttcgaaaagtcgtggttgaaggcgcagtggatcacggcgtccgcctgcgccgcgccgcgtttcaagctatcgagatcttccaacgttccgtagtgaacctcggcaccggcggcggcgagcgcttccgcgcccttgtccgaacgggtcatgccgagcaccttgtggccggcggcgatcagatcattggtgacggccgagccgacccaaccggtggctccagtaacgaacacacgcataagcaatctccaggttttgctggagacagaattgggacgccgcgctatcgtggtaaagtagtgaccttatcatggtataatggctaacaggatgagcgaaccgctcgcacacgagaaccttctcggtgcctacctgaaggaccgtcgcagcaagctcgatcctgcgacgttcggctttccgccggagcggcggcggacgccgggcctgcgccgcgaggaagtggcgcagcgcgccaacatcagcgcgacctggtacacgtggctcgaacagggccgcggcggcgcgccgtcggccgacgtgctcgaccgcatcgcgcgtgcgctgatgctgaccgatgtcgagcgcgagcatctgttcctgctcggcctcggccgggcccccgaggtgcgctatcaccgaagcgaaggcgtcacgccgcggctgcaacgcgtgctcgacctgctggagccgcatcccgccatcatcaggaccgcgacatgggacgtcgtcgcctggaaccgggcggcgaccgtgatgctgaccgactacggggcgctgccgccacgcgaacgcaacgtgctgcgcttcatgttcctcgatccgcgcgtccgcgccgcgcaacacgattgggccagcgtggcgcgcttcgtcgtcggtgcgttcagggtggacgcggcacgcgcaggggctgccgccgaggtgcagccgttcgtcgacgagctctgccggctcagtccggaattcgcggcgctgtggcgcgacaacgacgtgcgcgcccatggcgaggctatcaagcagctccggcacccgatcctcggcccggtcaggttcgagtattcggcattcgcggtcgatggccgctccgacctcagcatgatcgtctacaatcctgtcgaccccgaggtgaaagagaagatccgcgggctgatggaggcgtcgccggcgcacgaacacgcgtgatcgccagcgcaagggacaggcccgaactggaatacgactgtcgtttgagtcgaacgaatcagactgcacgcgcaccgactgacgctgcggacatggcaagaggccgacaaggccccatttgccggaatgtccgcggaccctgccgtgatgcagcatctgcgtcctcttccgacacgagaggcaagcgatgcctgggtcgatttccagatcgagcatcaatcgacccacggattctgcatgtgggccacggaattgagctcctccggagtgttcgtcggcgcagtcgggttgctggtcgtcaacttccgggctcacttcacgcctgccgtggagattggctggcgcctggctcgtgaattctgggaacagggactcgccacggaagccggtcgcaaggcgctcgaatttggtttccgagaactggctttgcccgagattgtcgcgcatgcgagcgttcacaacacgcgctctcttcgcgtcatgtcgaaattggggatgtcccacgacgaggctgacgatttcaatcatccgcgtgtcagcgaatccgatccgctccgacgacaggcgctctatcgcctggcacgaaacgattggcttatctcgacagggccgacgcagcggcccggcgcgacaagctgaaatatctagtcccgcgccgccgccgtcgggcgccacaccaagagccgcttctcgaccgcggtcaccgccatgtcgatcaggatcacgaaagccgacagcacgaacatgccggcgaacacgccggcgacgtcgaacacgccttcggcctgctggatcagatagccgaggccggcggcggagccgagatattcgccgaccaccgcgccgaccacggcaaagccgaccgaggtgtgcagcgaggagaacatccatgacaatgccgacggccaatagacgtggcgcatcagctgccgctcgttcatgccgagcatgcggccattgtcgagcaccgtggccggcacttccttgacgccttgatagacgttgaagaacacgatgaagaacaccagggtcacgccgagcgcgaccttggaccagacgccgagcccgaaccacagcgcgaagatcggcgccagcaccacgcgcggcagtgcgttgaccatcttcacatagggatcgaacacggcggcgacgcgcggctgccgcgcgaaccagaagccgaccaggatgccgccggccgagccgatcacgaaggcaaggatggattcccacagcgtgatcgcaaggtgcttccagatcactccggtcgagaaccacttcacaatctggctgaagacgtcgaccgggttggagaagaagaacgacggcagcagcaccttgccgaacaccggcacggtggcgaagacctgccacagcgccagcgtgacgaccgcaaccaggacctgcagcgccagcaacgtgatgcgcgacatcaggcggctcccgcctgcgtcgactgggcatagcccttcatcacctcgtccttcagcacgccccagatctcgcggtgcagggcatggaaatccttctccatcctgatctcggcaatgtcgcgcggccgcggcagcgtgatgcgccagtcgccgatgatgcgcgccgacgggccggccgacatgatcacgacgcggtcggcgagcgcgatcgcctcctcgaggtcgtgggtgacgaacagcaccgccttgcggtcggcggtccacaattcgagcagtagattgcccatgatctgccgcgtctgggcgtcaagcggaccgaacggctcgtccatcaagaggatcttcggatcgcggatcagcacctgcgccagcgcgacgcgcttgcgctggccgcccgacagcatatgcggatagcggctagcgaaggcgccgagcccgaccgaggccagccattgctgcgcgcgcgccagcgcatcagcgcgcggcgtaccgcggatctcgagcccgatcgcgacattgtcgatcgcggtcttccacggaaacagcgcgtcggcctggaacaggtagccggcgtcacggttcaggccgttcagcggcttgtcgaagatccgcgccgttcctgcggccggtttcagcagccccgcagtgacgttgagcagcgtcgacttcccgcatccggtcgggccgacaatggcgacgaactcgccatgatcaaccgaaagatcggcctgctcgaccgcggtataaacccgcccatccgccaaccgaaacgccaccgtcgcaccgtcaagtgcgaccgccgtcggctccgccattgccacgattcctccccgaactttccgaaatggcttagcggttcgggcagccaagttcaacgcaggaagatggcgcaggaggcgctgagaggaccgcggtcacgcggttttcaggccgacgaggttgcgcactgcgcaaccgggttgcctgtcgcgccgacttcgtcgaggctgcggtccaaagcgacggacagggagatgatagatgcggatcgcagtggtaggcgccggaggcgtcgggggcggctttggcgcggcgctggcgcatgctggagccgacgttacctttatcgcgcgcggcacccacctcgccgccatgcgcagcgaaggcctgaaggtccagggcggccgcggcgagacccatctggtcccgacccaggcgaccgacgaccccgcaagcgtcggcccggtcgatatcgtgctgttctgcgtcaagctgtgggacgtcgagagcgccggggcgcacatcaggccgatggtcggccccgacaccgcggtgatcccgctgcagaacggcatcgacgcgcccgaccggctgatcccgatcctgggccgcgacgccgtgatgggcggcgtggcgcagatttcggcctcgatcatcaagcccggcgtgatcaaccaggtcggcaccttcatgcgcatgatcttcggcgaactcgacggccgcatcacgccgcgcggcaaggcactgctcgagctctgcctgaaagccggcttcgatgcgacgctcagcgaggcaatcaacaccgagctgtggatgaagttcatcggcctcgccaccaatgccggcatgaccgcggtcacccggctgccgatcggcaggctgcgcgacgatcccgacctgcgtccgttgttcgtctccgcctgcgaggagaccatcgcagttgcccacgccagcggcatcgagctgccaaaagatgcgctggcgaaggtgctcgacttcatcggacacgcgccgccggcgatgaaggcgtcgatggcgcttgatctggaacgcggcaaccggctcgagctgccctggctgaacggcaaggtggtcgaactcggccgcaagctcggcgtgccgacgccgacccacgccatgctgtatgccgtgctgaagccctatgcgatgggcgcgccgtcgtaagcaggccgccgcgcgaacgcgcgatgctgcgttgggcgcgacgcagggtcagccggaatgtgacctgccggcccgaaacagccataggtgttgatcggataaccgtgtaggctgcccttgcggtcagcgtttggctgaccgagagctgcaataaggcggagacatgccgaactctccgcttgcgacggttggcagcctattccatcggcaaccattgttttcgactcccgtattcacgcggcagcgaatgtgggcatccacatgcgacacgcatgacctaaacattgatcacagggagaatgacagtgagagcagaaaccaccgttgccttgtccatgctggccggcgttgcgatcggcgccgtcgcaatcgaaggacttcacgcacaatccaccccgaaggcctatgtcgtcaccgaggtggaggtcctcgatcaggacgcgcagaatgcctatatccccaaagtcacggaggtgatcaagtcgaccggcggaacatacctcgctcgcggcggaaccaccgtcgcgttcgagggagaggcgcccaagcgcgtgaccatcaccgtctatgacagccttgcaaaggctcaggcttcgcgcagttcggccgagtggaaggcactgagcgcagagcggagcaaggcgatcaaggccagatcttacgccaccgaaggtttggccaactaaagcgcgataaagttaggttgaatcagttgggccacgaacctctccctttggagagatcgatttgcgcagcaaatcgggtgagggattacggtctatcgagggagcaagaagccctcacctggattgctctggacgatgcttcgcatcgccgggcgcaatccgacctcgccccggcggggagacgtgaaccgagggcgcgccaggccgagttaatcaaaactcatcccgctgtagcccgcgatgagattgggttgaatcgtcatctcgctttggctgcttgttcgagcatgaacttttaggaaaaccgcctcgcacttttccggatcacgctctaatcccggaagcaaggcgcctgtcgacgctggacgatggcgcaggcaggcgcctctccgtgtcacggccgcgcgaatggagccgcagctccgctcacgcatgctggggcggggcaagcgtggcgacctggtcggaatgcaccgtgattgccgtgccgccatgtccatcgctcgcggcgacgaaggtggatgccatgtagtttccgagcagggcgatgctggcggtgtggatgccgtccgagaccgtgaccgatccgccggcgctgttgccggcaaagcccacggtttgcccggccgcaaaattgatgttggcgagatcgatcgcgtcggcgcccgacatgccggcgacggtgccggagaagccggcggggtcgtcgagcctcagcgtcccggtgtccgatgcaaaggagatctgagccgcgctcgcggacgcaagctcgagggtctgtccggccggaatgatcgagggatcgctgatcgtgaaggcgctggaccaggcgccccagacggtcccgtcattggccttgatccacagcgtgtcggtgcccgatccgacgtgatacgcaagttgcgagagctgcgaggccgagacgatgtcgtcctgatttgctccgagcgtgacaccgttcagcgtgaagtagccgctcccgccgccgctattccagacatcatacgatgtcgcggaactgccgaacggatccgaatagctgaacagcgaggacacagcgaaggtctggccttgaacggacagcgtgcttgaattggtcggggtgacgaccggaccgctatcgaccggcgcggtcacggtgaaggcactcgaccatgctccccagacggtgccgtcattcgcgcggacccacagcgtgtccgctcccgaaccggattgatagctcagcgacgccaactgggcagccgtgacgtaattgtcctggttggtcgacagcaccgccccgttcagaacgaagtgcccgcctcccgtacccgtgttccagacgtcatattggctcgcagcgctgctgaacggatcgctgtaggtgaacagcgacgaggccgcatagctctggccgtggggcgcgannnnnnnnnncctgcgtggccgaaagtgccgctccgttcagaacgaagtgcccaccgacggtgccggtatcccagacatcatattcgacggccaggctgttgaacggatcgctgtaagtgaacagcgacgaggccgcataactctgaccgtggggcgcggtaatgttcgacaccgcctcgacgggcccgctgtcgatcggagcattgacggtgaaggcgctcgaccacgccccccacaccgtgccgtcattggcgcggatccaaagtgtgtcggtccccgagccggactggtagttgagcgaggccagctgggcggcagtgatgtaattgtcctggttggccggcagcgccacgccgttcaggacgaagtgcccaccgacggtgccggtatcccagacatcgtactcgacggcggggctgctgaacggatcactgtaggtaaacagcgacgaggccgcatagtcctgtttggccgacagcgccacgccgttcaggacgaagtgcccgcctcctgtacccgtgttccagacgtcgtattgtgttgcaggactgctgaacggatcgctgtaggtgaacagcgacgaggctgcatagctctggccatggaacgcggcgacgtccgacaccgtctcaacggggccgttgtcgaccggagccgtgactgtgaaagcgttcgaccactgtccccacaccgtcgagtcgttggcccggatccagagcgtgtccgagcccgagcccgattgataggtcaatgacgacagctgcgcggccgtgacgtaattgtgctggttggcggcaagcgccactccgttcaaaacgaagtggccgccaccggtgccggcgtcccagacgtcgtattgggcggccgcgaagccgaacgggtcgtaataggtgaacagcgacgacacggcaaagctctggccgtgccatgccgtcacgtctgcgaccgtcaccacgggcccttccgggattgccgcaaattgggcccatgtgctccaggacacgccgttgaacgcccgcacccacagctggtcgctcgcgggaccgaactggtaggcaatgttggaccattgtgaagcagcgacgtcgacctcaaccccgttcgcctgcgccaccccgcctacagtgaagtggccgttaccggtggagtcccaaagcgcatactcgatcaccggcaaagtaccgctcgtcacatagaacatggacgatgccggaagcgaggtttgcacccggccggttatgttggaggcgaccaccgttggcgcgacgtcgacggcgccggaattatcgatgacgaagtcgccgccctcactggcgatctgggtgagcgatacttcgaattgcacatcccagttttgaccgggatagctgtttccccacggattgcgaacgatgaaattgccggtcgcactgtcatagccgacgactccgaaagcgtgatccgggaccagctggatatttccggcgctgtcataggtgtacggcgatgtcgaaggaatctcgaggatgacgtcgtcgtagctggcgagcgcagcgatatagacggacttgttgctataccaattggacgcgctgctcatgtaatagctgacgctggttgcgtcagtcagattctccaggacatcggtcggaggatccgcagagatgttgttgtagctgttgaccgccgggtgcccgatctgtcccgttgcgctgagttgcgcatacgccttctccaccagggcaacccacatcgcggtgggttgctcattgtagttgtgaccgtagtcgagttcggtcccattgaccgttggaaacatgtcgttgacggtttcccacgtctcctgccccccgacatagaagcgcacgccataggtgccgtttccattgtcgacgaacatggaactcaggacctgcggatgaaagacgacgacgtcgatcaatcctgacatcagttcgcaatcgccgtcggctccctgacagatgtcgttgacggtggctgcgcccgccgaggaatacaacggtccgacaaccgcgctgtagccctgcaatgtccagccgttcgcatccggcggcaaagtcggatccgggagatcggttcccaggaaccacttcccgagcagctcggacatctgcgtcgacgtcgtgccgacctgcagattgccgagcgtgacatggaccgtactgccccccgtcaaggtggcgttcgccggattaccgtcaacgagctggccgaaaagatgggagacatagtccgatgtggacagcccgctgttcagattggccgcaatcacctgcagcgagttcagctcattcgcggtcacgctgccgcgattagcgacgttggccagcaagtcataggcttcggcgtaagtgaaaaccccgtccgcagcaaagttgagcatgtcggacttgacgccgctgtcgaccagggaattgatccagcttgcagtcatggaattccttcgcaggtcttgacgggctaagattgctgtcgaccaggccggtcctggcaaggtcgcatgcgtcccatcgagacgaatccagcaatggactacgtaactatcgcgttagttgtggccgaattcgaggcacctgtcgatctcgccggatgcagccgtcaacgaagggaacccgtattctcgtgaagattcgttaacgtctgcctgctaccgcgcccgccgcccagcatagcggtaggggcgacacccgatgtcaggttcctggttaccgccttggcccgcgcgcacgcgttcggggacggctggcgcgatgccctgaaggcttccttccgatgaagcgctgcagcgctatcaggccgcgcggctgacgcggaccaatgcgaccatggcgaagtcggccgggagcgccaggcgcttccataatccggcgccggccgacgccgaaggcgccgaggcctatgtctcgcacgaatggcggccggaccgcgtgcgcgaacgctacggctggctgttcacctacgacgcgatgaaggtaccggtctggcggcaggcgttcgacctgcccggtgctcccgcgtcagcgcgtgtgatgccgtccgcggtgagccgagcgcttcggtggcggcggcggcgcgaagaagggattctccgagcacatcgcaccccggcccgacgctgacgcctggcactgcgggatcgaagtgaagctgcaatcgatgtagctcccgccgaacttgccctgaaagacgtgcatgcataccggatagttcggatcgtaggcctgaccggcggcaggtccggccagggcgaccgcaaatccggcgatcgcgaacagtttcaggcgcatcggtctgtccttgtcgtggcgggaggttcctcacaactgccggagttagtcaacatcactgccggcgcgacggccatgcagatcatcacgggcaaacgacgtgccgatgcgcaagcgctacagcgcgatgagatcaggttgaatcgtcatggcgcttgagctcgctgtttgagcatgatcttttcggaaaaccgcttcgcacttttccggatcatgctctaggtggcaggttggcggtgtcgcttgctccgctctctgggctgcgttttcgggcccttgtagaagggattgaccgaacacgtcgccgatcgtcccgaggctgttgcctgacactgcggaagcgacgtgaagctgcaatcgatgtactcgggcgtcagccggccgccatagacctccatgcaaaccggatagttcggatcgtacatttgcgcggcggcgggcccggcgaggcagacgccgacggcggcgatgatggtgaatttcaagcgcatcgaatgctcctcaagcttgggtctcgaacgccggggcgtggctagcgctgttcgccggccggcttgccgtcgtcctcacccagacagcggatcatgaaagccgttgtgtcccgcggcagcacctgtgcggcgcgtgccttgagacggcattcgagctgcgcgatctggcgcgcccgctgccgttccgacggcaatgctgattgccgcaaccgccgcaaggtcatcggtgagccatccgactcgaagctcagctcgtatttcttgccgttctggtcggtggcagcgcaggcaacggtcgacacctgccgcgtgatgaagcttccgacctggcggcaggagccggtcgacatctcgaccagcggcaccggcagtccatcgacacgcgggcggtcgctcgacttcagcaacatgcgatcgaccgcgagctcgaacagattgtcctgggtgcgctcggtgctctcgccggagaacgagacgatgtggctcttgtcggcgggatcgtcgagcaccacggtgaattcggagcggccgcgcagcgtgtggaaataggccaccgccttgcaggtgtagctgcggccggcaatgctgacattgcggcaggtgcccgacatcaacgcataaaggtcgacgtcatagaccgggcccgcggcgacagcgagcgccggccagcagacaatggaaaccgcaatcaattgagcgaaacgggagatcatgctgaaacggtcgagaacgcggtcgttggagaggcccatggcgcagggtcgccgatttccacggactgtgcaacgaagaagcgggcccaaatgtggaggccccgcaagcaatcgcccgggaaacgcagggcaaaccatgcggaaaggccgcggcgctcgtggcttgcgtcagatttgcgggccggacagagtgacctcgcgctccgcgcggaagacgttgctgtaaagattcgcgatccactgacgaccgcttgccgtcatgttcaggcaattgatggcgccctggatgtgcggcgcaaccatattccagtagaattgcggatagcggtcgacgatgtcggccggcgattcatagccgagctggcggttgataccgacttcctcgaactcgtgatagagcgcgttggccttcctgatgtagttgggatcgccgagttgcccgatgaaatcggctgcccggacgatcgccgcctcgtcgtcatagtgctggccttcgggcgatggaaaccgtgtgccctcgatgttgcgcgcgacgcgctcgcgatcgagcggcagcacggcctcgagcctgtcgagcacatagagcttcgagcggtcgacgtgatacggcatcaggccggcatccgacgagcctcgcggcagcacgaccttgttgcccgcggcatcgatgacgtagccatccggtccatcgcccttcagcaggccgcgcacatagccgatgtcgtgcgtcaggcaggcgatgatcgtgtgggtgtaatcctccgcggtgacgtgggtgtgcagcgcgcggccgcggatgatgtcgtgcccggccagcgtgaccagcatcgtgtgctcgacattgtggtagagcgcatcgctgttgccgatgcattccagcgcgatgcgcgcggcggccggcaggagttcgccaaagcgcgcctgcgaggccccgaaggtgcggctgacatgggtggcgagaaacttctccaaagcacccgctgccaactcaggtaacgtcatcatcgatgcagcccccgaccgcgcaacgttcctcactcgtcccgatctcacgtcgtagttgggtggcaactatagcgtatctgcgggcgtgcggctatgcgctggcgggcgcgcgattcattcagccgtacttttccggtcttgccggctgcggcaccaaagtcgctgataatggcatgaaccgtgcatgattcggttcagaccgggttaatcctacggataaacaccatcatgctcgttacgctcgtcgccatcctctgcaatgctcagctctgcatggaaaaggtcgtcaccaacagcgaccaatccggcatcaccatgggcgcatgcgccgtgaatgcccaaatcggcatcgccgattggctcgccaaggggccgtatcacgattggcgcttgcagagctacaagtgcatcatgggcaaatacgtccccaagaacgaagtgtgatgtgtgctcacagcccccgaaggggctgaccggtttcatctgcccgactggaacagcctgcgaaaccgcgtgatgcaggcgcgtgcaccacaagtcaaagtccattttatgggctatcactgtcgtccgcgatggtgaaagacacgtgaggtcgcccaggaatggccagagaatgcccgcaacgccgctgattgcctacgcgcatgtcggcaagagttttgacgatggacgcgtggtggcggtcgacgacgtctcgcttgacgtggccgagggtgaattcctggctgttgtcggcggctcgggctccggcaagacgacgctgctcaggctggccaaccgcctgatcgaagccgaccgcggcaggatcgcggtcgagggtgaggatgtcagccgcatcgacccgatcctgctgcggcgccgcatcggctatgtcttccagagcggcgggctgtttccgcacctttccgtcgccggcaatatcggcatcacgccgaagctgctcggctggccgcaggcggagatctccgcacgggtcgacgagttgctcgatctcgtgcggctcgatcgcgcacagcatcgcgaccgcctgccgcacgagctctccggcggccagcgccagcgtgtcggcgtcgcgcgtgcgctggctgcgaagccgcgtatcgtgctgatggacgagccgttcggcgcgctcgatcccttgacccgcgacgcgctcggagacgactatcgaacgcttcaccgcgcgcttgggctcaccacgatcatgatcacccacgacatgaccgaggcgctgctgctcgccgaccgcgtggcggtcatgcaccgcggcaggttgctcgcgctcggcactgctgcggagctcgcggcgagcaccgacgcctatgtcggcgaactcttgcgcacgccgcggcgacaggcggaacgcctcggcgcattgctgccgcgggacgccacggcatgagcgatccacgctggagcgaggcgcttgcgcatctgcccgactatctcggcaaccatgtccgggtcagcgtcgccgcgctggcgctcgggcttttgatcagcctgccgcttgcgatcatcgcccgcaaccggccgctgctgcgcggtgcactgctcgggcttgccagcatcgtgcagaccgtaccgggcctcgcgctgctcgcgctgttctatccgctgctgctggcgctcgccgcactgaccgcagcgtggctcggcttcagcttctccgccttcggcttcctgcccgcggtgctggcgctcgcgctctattcgatgctgccggtgttgcgcaacaccatcaccgggctctccggcgtcgatccggcggtgctggaggccgccgagggcgtcggcatgacgccgcgccaatcgctcaccatggtcgagctgccgctggcgctgccggtgatgatggcggggatccgcaccgccgcggtgtgggtgatcggcaccgcgacgctgtcgacgccgatcggccagaccagcctcggcaattacatcttcgccggcctgcaaacccagaactgggtgttcgtgctgttcggctgctttgccgccgccgtgctcgcgctggtcgttgaccagttgctggcgctgatcgaaagcggcctgcgcagtcgcagccgaacccggaccgcgctcggcggactcggcatcgcggcgctgatcgcggcgacgctggtgccggcgatcgcgcgtccacaggcccgctatgtggtcggcgccaagaccttcaccgagcaatatgtgctgtcggcgctgatagcgcagcggctgcaagcggccggcctgccgacgacgacccgcgccggcctcggctccaacgtgatcttcgatgcgctcgcagccggcgacatcgacgtctatgtcgactattccggcacgctgtgggccaaccagttccaccacagcgagatcaggccccgcgccgaactgctgagcgaactgaagacgacgctgggcaagcaggacatcaccctgttcggcgaactcggcttcgagaatgcctatgcgcttgtcatgccgaaggcgcgcgccgatcagctcggcatccataccatcgccgacctcgcctcgcatgccgcgacgatgtcgatcgccggcgactatgaattcttctcgcggccggaatgggccggcatccagaagtcctatgggctgtcattccgcgcccagcgaacgatgcagccggacttcatgtatgccgcggccgcctccggcgaagtcgacgtcatcgcgggctacaccagcgacggcctgatcgcgaaatatggcttggtgacgctcgatgacaacaggcacgccatcccaccctatgacgccatcgttctgctgtcgccgaagcggcgtgacgacgaggctctcaaggcggcgctgcggccgctgctcggcaggatcgacatcgcggcaatgcgcgaggcaaacctgcgcgcgtcgggcaatgacgcatcgtcatcgcccgaagccgtggcgcgctggctgtgggagaaagtcgggccgaaatagattgcgtaggatgagtagagcgcagcgaaacccatcctctctcccgtagctaccaaggcgatgggtttcgctgcgctctacccatcctacacctctacaatcccttgatgatccccgcgtcgatcaacaggcggttgaagcggcgcgcttctgcgccatccttgcaggagtagaacgcgccgttgcagcgaagcatgatcgccttctgctcctcgaacgagggatccagcggaatgcccgcggcttcctggatcaccagcggcagataggcggcatcgatcgtgtccatcaccgccgggctcttcaccggttcgaagttgacggcatcgatcgcgtaatatgtcgcgtagtagcgcggatcgtagtccatcagcttcttgccgatgccggcctcgtcgagctcgggatcgagcagctgcggcgagaactccggctggtgatcgccgtagcgcacgatcaggaacggctgcgccgggaacttcttcttcagcgcggcgacaaagccggcatagtcgcccgcgctcatcgcctgccggcgcagatattcgtcgaccgacggcgcgttgcccggccgtttccatgccggcagcagctcgggacgaaatttcgtctcccacgggaagtgattggcggcgagatagacgaaggtgaacagcggcgcactgagcgtcttctgctcggccatcagcttcagcgccttgtcgtagaagaagctgtcgggctcgacgtccttcgcgtgcagatcatgcgcgtcgtagaaacgctggatgccggtcgtggtctggaagctgcgcgcactcatgaaggcgccgaacgccggatacagcgacagtgtatcgtagccgcagcggcgcagtgccagcggcaggccacgctcgacccggcccgaggcgatgcgggtgacgaaataggcgaaccggccgaacgagcgcgaggacaatcccgcgagtacgttgtactcggtgaaccagctcggcccgccattgctctcggcgaggaatttgcgttcgacgccgtcataggatttgaactggctgccatagccggacgggaccttgacgcccggtgcggtacggatgtcgaagctcgattcatcatggatcatgatgatgttcggccgccgcccggcgggatggcaggcatcgaccgtaggtatcttgagctggtcgctcgccgagggatccgactccatgaagccataggcgacgaagtccgatacggcggtcacaccggagcgtgcgaacttcgacaggtagccgtcgtcgtaatagccgcgccaggcttcatccggccaggcgaaggcatagcccgagagcgccgccgtgcaggcaagacaggcagccgcggccggcaggcggcggatgcggaacggatcgagccaccacagcgcgtacatcaagggcagcgtgaccaggccggcgccgatgatcgaccagcgcaggttcggaaagatcgtgagcaggaacgccgcggtgtcgcgatcgatcaccatcaggtcgacgaagttcgcggtcatctgcaccacgtcgtgcttgaagcgcgacagcagcaccagcaccacgaccagcgtcagcgacagtgcgcccgacagcgccggcctgcgcagcagcgtgatgaacaggaagttcaggattccccaggtcagcaggaagcacagccgcgagccgaaatcggtctcggtccgcagcatcaggatcagcgcgccgagatgcggcgcggcgaccgccatcagccgccagacgccgatcgcggcgagaccgccggccagtgcggcaaccgacgaattttgctgaggcgcgggcgccatgggcgggacgcaatactatccggcgcaatgtcacggccttgactggcagaggccaggaggcacaccgcacagccggtatctgcgccgtgtcataaaatcgtaattgaatcgtcatgaacgcgcaatgaatttgcccgcccgggtgcgccggcagacagcgaccctgcggcctagacctttgcctcagccgcagcgggcgccgtgatgcccgcgatgaagaggtcgaggatgtcggcggccatccgcccggcctccgcttcgccgacgccccagcgcggcaaatggccgtcgatgtgcatccgcgcaaaaccatagaccagcgcgcggccggcgatctggacctgcttcaggtcaagcgcccggagttgtccggcggcagatgcctccgccagcatgcgctcggtcaggccgatcaactccgcattgtcgctggaaacgccggccgagcggtcatggtcgaagaagcggcggctggagatgatctcgaaatgggtcgggttcttcatggcccagcgcagataggcaatcccgaggcagcggaaacggccgagcggatcgcccggcggtgcgtcagtcagcgccgcctcgatctcggcacggaaacggcgctgcgcctcctcggccaccgcattcatcagggcatcgcggctcgggaaatgccggaacggcgccgccggcgaaaccccggcgcggcgagcggcttcgcggacgctgaccgcgtccggcccgccctcgccggccagctgcatcgcggcatcgatcaggacccggcgcaagtcgccgtggtggtagggcttggccgccggcgcccgcgccgcggcggccggacgcggcttggcgggtcggcgtcccgaaggcgggcttttgacggagcgacgcatcgcgctttggctctttgtttgagcatgaccttttcggaaaaccgcttcgcacttttccgggtcatgctccctagcatcacccgcttgtgaatgtaagcaccgattacacggattgaccgcgcgcgatcgcgagatgtaactggtgattacatcaacatcgggaggcaggatatggcggcgcgtcggaactggttcgagggctggcggctgttcggcgtgctcactctcaccctgatcgggctttcgatctggatcgccgcgatgcggcagttcgaggtcgagggcctgcggatggtgatccgcttcacggcgcggacctcgctgctgttgttctgcctcgccttctccgcagcggcgctggtgcggctgtggccgaacgcctggacccactggcagcgccgcaaccgccgttatctcggcgtcacctttgcggcgtcgcacgccatccatgcggtcgcaatcaccgcgttcgcgatgctcgatcgggccggcttcgcagccgcgacttcggcggtctccaccatcttcggcggcatcggctatctcgtcatcatcgcgctgaccgtgacctcattcgatcgcacggccgcgctgctcggtacacgcgcctggcgcaggctgcatctgatcggcggctattatctgctgctgcagttcacgatctcgttcggcaagcggatcccggagatgccgctctacgcgctgttcctcgtgccactcgccgcggtgttcgcgctcaggatgatcagcatggccgcgcggcccgcgccacatcaggcgcaggcgggctgagatcgcgccgcctcacaccaaatgaaacttgcggccgagccggcgatgcaccgacagcaccgcgcgatcgacgtcgctgatcaggctgtcgccgagcacgacgttcggaatctcccagttgcgcccgatctgcgcgtcggggagcgccgtgaccgccggcacgcgcgcggtctcgcagccgggctgggcgcgcagcgcctcctcggcaagtcgggtcaattcgtgctggctctttccgtcggtcatgaccgcggtcctgactccggaaaatggcccactgatggccgagattctccagttccttggcgcgggcttccgtcatgccgcgcatgcattcgccggcatcgagccttcgccgaggtcgtaatacaggcagttgacgtcacggtattggatccattcaggccgcaccccggctggccttcccgatccgcgcaggatatttcatgggcgtggaggcaccatgcggcgcaacctgacgcctatgatcattctggccgtggtcggcctgctcgtcggcgggctgtttcgctatgccttcgatcggccctacgaggcgtcggtcgcgaactacgtgcgaagcgccattgagggcgccgccatcaccctgatcgtctgggccacgcacctttatctggccgcgcgtggcggctggctgcggcaacggccgctcatcgtcgagttgcttgtccgctccgttatccttgccgtcatcgtcgcggttgccgcgattgtgctggaggtcgtgctcaacgagcacgggatcgacacgaaatttttccgcaaaaccttcctgaagatcatcggcgtcgccctgctgctgtcgatcccgatcacagcgatctacgagctggtgcggatgatcggcgggcgaacgctgctcaacgtcgcgcttggacgctatcgccagccggtgcgcgaggaacgtgtgctgctgtttctcgacctagtcggctcgacgacgctggcggaacagatgggcgagctgcgcgtgcaggagctgttgacgcgcttcttctctgacatcgatgcacccatcgtgttgcacggcggcgaggttcacgcctatgtcggcgacgaggtcatcgtgacctggccggccgatacggacaagggatcgcggcgctacctcgactgcgtgttcgcgatcgaggaccgccttgccaagcgggccgatcattatcgcaaggcgttcggcgtggtgccggcgtttcgggccgggatgcatgccgggccggtcgtcatcgccgaatgcggggactcgcggcgacagatcgcctatttcggcgacaccgtgaacgtcacggcgcggctgcaggcgcattgcaaggaggccggccggccgctgctggtatcgggcgaactgctccgcctgctgccgtcacagccggatcttgccatcgagccgctcggctcgacgcagctgcgcgggcgcgcagcttcgatcgacatattcgccgtcgcgcgccgcgcaacgtcctaaacaattccttacagcgcaccggcaccggcttccgttgggccgaaagcacgaatttaatcaaatctggtcgcggcccgttaaggatgcgacgcaccccgtatttgcaccgggttccaccttaacgcaggtgtaaggtggctatcgatatcgtgcagtctgttgttatcaaagaaaacaaggttgcccatcgatggcgcaacaggcgtcacaatcgattattgccgaactcgaggatgcggtccgggacgggacatcggccaagcgcgtgcagacgctgcggcaggtcaccgatctgttcctgaacgatggcgaccgcctcaacgatgaacaggtcaaggtgttcgacgacgtgctctgcctgctggtggcgcgcgtcgagacgcgtgcgcgggccgagctcagcaagcggctcgcaccgctcgactatgcgccgtttgatgtgattcaccatcttgcctgggacgaggatatcggcgtcgccggcgaggtgctgacccactccagccgcctctcaaacgccgcactgcgcgagatcgccagcagcaagggacaggatcatctgttcgcgatctcggcgcgggaaaatctgcccgcgttcgtcaccgacgtgatcatcgaccgcggcgaggaccgggtgatccggcgcctcgccaagaacgccggcgctgagttctccgacaacggctactccacgatcgtcgcccgcgccgaaggcgacgacgaactggtcgagatcctcggcctgcgcatcgacattccggccaagctgttgcgcgacctgctgcagcgcgccaaggacaccgtgcgcgcccgcctgctcgcgatcgcctcgccccgcgcgcgcgaggagatcagccaggtgctgaacgacatcgcgcaggaagaggccgccgccccgcgccgcaactacggcatcgccgaagagcttgtgaagctgatgaagcagctgaacgagctcgatgatgcggccgtctacaaattcgccgaggacggcaagttcgacgaggtcacggtcgcgctcgccgtgctcaacgacatgccgatcgcgatgatcgagcggctgatgctcgggctgcgctccgacctgctgctgatcccgtgccgctcggcaaagctgaactggccgacggtcgaggccatcctgcgcaagcggccgctgccgcatgccatcgaccacgcgacgctggagatcgcgcaacgcgactaccggcggctgtcgctggagaccgcccagcgcacggtgcggttctggcaactgcacaacaggatcgagaagcagccgatcacggcgggctaaccggccgccggcgttattcgcagacaaggaaaaagggtgggcagtttgactgcccacccttttttatcgtcgatgcgcagggtgggttagccgcaggcgtaacccaccccgcaagaccgcacttagttcttgctcttgtcgaccagcgcgcccttcttgatccagggcatcatgtcgcgcagcttggcgccgacttcctcgatcgggtgctgggcgagcttggcgcgggtcgccttgaacgaggtctggttgaccttgttctccagcatccagtcgcgggcgaacttgccgccctggatgtcggcgagcacgcgcttcatctcggccttggtctcggccgtgacgatgcgcggaccggtgacgtactcgccgtattcggcggtgttggagatcgagtagttcatgttggcgataccgccttcatagatcaggtcgacgatcagcttcacttcatgcaggcactcgaaataggccatctcgggcgcgtagccggcttcgaccagcgtctcgtagccgcccttgatcagttcgaccaggccgccgcagagcaccacctgctcgccgaacaggtcggtctcgcactcttccttgaaggtggtctcgatgatgccggcgcggccgccgccgatcgccgaggcgtaggacaggccgaggtcatgggcgttgcccgaggagtccttggcgatcgcgatcaggcagggcacgccgccgccgcgctgatactccgagcgcacggtgtggccggggcccttcggcgcgatcatcagcacgtcgaggtcggcgcgcggatcgagcaggttgaagtgcacgttgaggccgtgagcgaacaccagcgccgcgcccttcttcatgttgtcgtgcaggtgctcgcgatagatgtcgccctgcagttcgtccggggtcagcatcatgaccaggtcggcccacttcgcggcttcggcgacttccatcactttgaagccggcgttctcggccttcttggccgaggccgaacccttgcgcagcgcgatcgcgacgtccttgacgccggaatccttcaggttcagcgcatgggcgtggccctggctgccgtagccaacgatggcgaccttcttgcccttgatcaggttcaggtcggcatcgcgatcgtagtaaactcgcatcgtggtttcctcgtttgaagggggccaaaatcggccgatgggtcaggctttcggaaggacagaaccgccgggcgcccgcgaatttccggcgttgtctagagcatttttcccctcaggggaaaccctcatctcgcatggcgcggtgcggcatcatgcgtccatgaagaccgggtagagcgaggccaagagcaggatggccatcgccacgttgaagacacggatcgcccgcggcgaggtcaggatcggacgcagcgcggtgccgaacagcgcccagacgatgcaggacaccgtccccaggatcaggctgaagccgacctggatcgcgatgttccaggggaaggcggcaattgccgcataggccgtgatggtgccgatcaccatcacccagcccttggcgttgatccattggaacatggccgcgccccagaacgtcatcgggccgcggccgggcccatcgtccttgtccgccgagggcggctcgtccatggcgatgacggccgcgagatagaccagataggcgacaccgccatatttcaggatggtctgcagcaccggataggcgatgaacacggcgccgagcccgacgccgaccgcgccgaccatgaaggcgaaaccgaccgtgatgccggcgatgtgcggcaccgtgcggcggaagccgtaggtcagccccgacgacagcagcatgatgttgttgggccccggggtgaagaacatcacgaccgcaaacacgacagaggcgaacagcagcgagttcgacatggtggcctcacgcgactttcggcagagctttgggacgcttcgacagcagcatcacggcaatgccgccgatgaccgtgaccatgccggcgagccgcagcggcccgaacctctccccgaacacgatgctggaggcggcggagccgacgaacggcaccagcaacgcgaacggcaccacctgcgcggcggggtgatcccggagcagccggccccacagccagtaggcgatgctggtcgaaatgccgccgaggcagagcacgcagacgaacccggtcagcgacatgtggctcagcgcctgccaggtcgcctgcggtccgttgctgatcagggtcagcaccgccagcggcaccgcggcgcacaggcacagccaggcgaacaggtcgaacatcggcgcggcgcgcgcctgccgcagcagcagattgccgatcgcaaagctgaccggacagatcatcagaatggcgaaggcgttgacgctgaaatcatagccgaccgtgccgcagatcatcagcaggccgagcgcggcgatcgcgacgccgatcgcctgcggccgcgtcggcatctcgccgaaggcgatcgcggcgaacgcaatggtgaacagcgcctggctctgcaccaccacgctggaaaggccgaccgggacgccatgcgcgatcgcgaaagcctgcgcgaggaactggccgaggaacagcgtggagctgatcgcgatcaagagcggccagggtacatccggcttgcgcaggaacaggcagggcagcgcggcgatggcgaagcgcagcgtcgtcatgagttccggcgagaactcatcgagcgcgatccggcttgcgacgaacgcaagcccccagatcaccgcgaccatgacggcgatgccaacatcagccggcttcattgttcttcttcttttgcttccgtttcggtcgggatctagatctgttcgtccggcttcggtttgcgcagcagataggtgccgtgcagcggcgcgtgatagtcggccgcgaccagggtgaaaccggtctcggtcagcatgcgctccatcacccagccgaaggtcgagtattcgtcgcgcatatgggtcatcacgctttcgcgctcgaaatcgtggttcttgatcgagaaatccgcccagccctcgacatcgcgatcgacaccgtcgggcatgctgacgaacaccatgtcgcgcagatagaaattcgcgccgggcttcagcgcgttgaagatccgcgacaacgccaccgccttccagaagtcaggcagatgatgcagtgtgaactcactgacgatgagatcgtatgaattcggctgataggcaaacgacaacagcccggccggctgggtccggatcttcgccttgcggtcgcgcgcatagatttcggcaagcccgatcatcgccggcgagatgtcgatggcgtcgacctcggcgcccatcagcgccgcctcggtcgcgagcacgccgttgccgcagccgatatcggcgatccgccagcccggcttgacgccgagcctggtcagcgcctggcgggcacggacatcgctgtcctcgctgacgtcatagatcgaggcaaccgcggtatcgagaccgacctgccgccgttgcgtgtagtaccagtcgcgcgccaacatgactcacatcccttccggcccacgcgtgatcgcggccaccccggttcgtgacacctcgaccaggcccaacgggcgcatcaggtcgatgaactgactgatcttggacgagttgcccgtgatctcgaatacgaagctctcggtcgtggcgtcgatcacccgggcgcggaacgcatccgccagccgcagcgcctcgacgcggtgatcgccgccgccccgcaccttgaccatcgcaagctcgcgctcgatcgagctgccggtcagcgtcatgtcgacgacgcggtagaccgggatcatgcggtcgagctgatgcttgatctgctggatcaccatcggcgtgcccgtggtgacgatcgtgatccgcgagagatgtttctggttctcggtctccgagacggtgaggctttcgatgttgtagccgcggccggagaacagcccgatcacgcgcgcgagcacgccgggctcgttctgcacgatcacggacagcgtgtgggtctcgttgggatcgtgacgctcttcgaggaagtaggcggatgcgggctggttcatggtcgtccccttacattcttttcacgccaccgcccgctgggcggccggcgcagcatccgtcccgatccaggtccggaacagatcgaaatcgatattgccgccgctcaggatcaagccgacccgcttgccggcgagcttgctcttctcctgcagcgcggctgcgagcgccgcggcgcctgcgccctcggcaagattgtgggtatcggtccagtaggcgcggatcgcctgggcgacctcgtcgtcggtgacctgcacgatgcgcgatgcgcccttccggatcagcgcgaacgcatccgcgtccggaatccgcgtcgccatgccgtcagccagcgtgttgctggtcgcggtggtcacgatccttccggccgcaaacgacagcgcgtaggacggcgcctcggtcgactgcacgcccacgatctcggtcttcagcccgagcaggtcgcgcgccatgatgcagccggagatgccggagccctgcccgatcggcacatagaggatgtcgagatcgggcgccgaccggaacatttcgagcgcgtacgtcgcgacgcccagcaccaggtccggatggaacgacggcaccatatgcaggcctgcgaactgggcgcggcgctcggcctcttcccgcgcggcctggaagtcctcgccgtgctcgacgagctcggcgccgaacgcgtgcatggcgcggttcttctcgaccgagttgccgcgcggcacatagatcaccgcgcgcacgccatggcggctcgcggcaaaggccaggctctggccgtgattgccgcgcgtcgccgagatgatgccgggcacgtccggccgctcgcgcttcagccgctcgagatagaccaagccgccgcgcaccttgaaggcgccggtcggcgtgtggttctcatgcttgaccacgacctcggtgccgagccgctcggccagcagcggccaggcgtacgccggcgtcgccggcaccgcggtgccgacgatcccgtgcgcacgctcgagctcgttgaggtcaaacatgatccgccctcacctcacaccagcgccttgccgccggagaaggccttcgcggtggcctcatcggtggcctcttccggcagcagcatctcgttatgcgccttgcccgacgggatcatcgggaagcagttctcgagcgcggcgacgcggcagtcgaacagcaccgggcgcttgatcgcgatcatctccttgatcgcgccgtcgagatcggagggcttggtcgcctgcaggccgacgcagccataggcgtccgcgagcttgacgaagtccggcagcgcttccgagtacgaatgcgacaggcggttgccgtgcagcagctgctgccactgccgcaccatgcccatgtactggttgttcaggatgaagatcttgatcggcagctcgaactgaaccgccgtcgacatctcctggatcgtcatctgcaccgaggcgtcgccggcgatgtcgatcaccaggctgtccggatgcgcgacctgcacaccgaccgcggccggcagaccatagcccatggtgccgagcccgcccgacgtcatccagcggtgcggctcctcgaagccgaagaactgcgcggcccacatctggtgctgaccgacctcggtcgtgatgtaggtgtccttgccgcgggtcagttcgaacaggcgctggatcgcgtattgcggcaggatgatatcgttgttcttgcggtaggacagcgagttgcgcgcgcgccattgcgcgatctgctgccaccacgccttgatgtcgggcttcttcgcctccgccttgaacacctgcaggagatcgccgagcacgttgccgcagtcgccgatgatcggcacgtcgacgcggatgttcttgttgatcgaggacgggtcgatgtcgatgtggatcttcttcgagcccggcgagaacgcgtcggtgcggccggtgatgcggtcgtcgaagcgcgcgccgacgcacagcatgacgtcgcaatcatgcatcgtcatgttggcctcgtaggtgccgtgcatgcccagcatgccgagccagttcggacctgacgccggataggcgcccaatcccatcagggtcgaggtgatcgggaagccggtcgcctccaccagttggcgcagcagttgcgaggcctcggggcctgaattgatcacgccgccgccggaatagatcacgggacgcttggcattggcgagcatcgccaccgccttgcggatctgggtcgcatcgcccttcacgcgcggcgtataggagatgtgcacgtccgacttgcgcggcggatgataggtgccggtggcaaattgcacgtccttcggcacgtcgaccacgaccgggccgggccggccggtggtggcgacatagaaggcctcgtgcagcaccctggcgaggtcgttgacgtcgcgcaccagccagttgtgcttggtggcgggccgcgtgatgccgacggtgtcgcattcctggaaggcgtcgttgccaatcagatgggtcggcacctggccggtgatgcagaccagcgggatcgaatccatcagcgcgtcggtcagcggcgtcaccatgttggtggcccccggacccgaagtcaccagcaccacgccgggcttgccggtcgagcgggcatagccttccgcggcatggccggcgccctgctcgtggcggaccaggatgtgctcgacctcgctctgctggaaaatctcgtcatagatcggaagcaccgcgccgccgggatagccgaagacatgctgcacgccgtgatcgatgagcgcgcgcacgatcatcgcggcgccggtcatctgattgggatcgtggctcttgtcggtcatggttcgctccggatgcgcttgtttttgcgcggcttttgtcggttctcgtcagttctgcttcgggcaataaaaaggggccccagaggccccatgcacaccgcccgaatttggatggccgctagccatccccggcggtgtgcctgggtacgacggcgataaggagtttggtaataatgttgcgcacgagacgacccagtcttcccaaaggttgcgcgaacatagcggccagaccctgaatgtcaaggcaagccagccattttcgcgatttttgaactgtaacggggttccggccgttcggcgagtgtttttgcgcggcgcaacgcgcatggctgacgggcgtgcggcggcgagggccatccgggctacggaatccggctctccagccatcccctcgccgcctccggcgccacccattcgaattccggaagctggtggcgaaaccaggtgaactggcgcttggcgtagtggcgggtgtcggcccggccgatctcggcggcctcctgccggctgatctcctccttgaggtgccggatcagcgccggcacgccatgggccttcatcgccggcagcaacggatcgagcccgcgcgccgccaatgccgcgacctcatcgagcgcacccgtatcgagcatcgcgccgaaccgggcgtcgatccgcgcataaagctgctcgcgttccggcgcgagaaacagcgcgtggaattcgccctgcggcagcagcggcggcaggccgtcgcgatgccagtccggcagcgggcggccggtggcctcgacgacctcgagcgcccgcgcgatgcggctgcgatcgcgcggcttcagccgttcggccgacatcgggtcgcgccctgcaagctcggcatgcagcgcctcgacgccatgttgctccagcctcgcgcgcacgccctcgcgcaccgcgggcgggatcggcggcaccgccgacaggccgcgcgtcagcgccttgaaatagaggcccgagccgccgacgaagatcggcagccgcccctgctcacaggcctcaccgagcatcttggccgcatccgccacccaggcgccggcggagaaattcacgccggcgtcgacatggccgtagagccggtgcggaaccagcgcctcctcgctcacagtcggccgcgcggtgatgatccggagatcgcgatagacctgcatggaatcggtgttgatcacgatcccgccggtccgctgcgcgagcgcgagcgccagggccgacttgccgctggcggtcggccctgcgataagcactgccttgtccaacaatcccgaatgcgcctgcatgtccctcgttgccacgctgatctgcaatcctgcaagccccgcgctcgattccaccatcgtcgacggtgcgcgggccgtgctgccctcacccggcccggcgcagtggctgttcaacgaggtcgccgtcgacattcccttcgagcgcgagaacgccagccgggacgacatcaaggcgatcgagctgcaactgcgccaggcccgcggcgacctgccgatcgacattgtcgtgcagccccggatcggccggcgcaagaagctttttctggccgacatggattcgaccatgatcggccaggagtgcatcgacgaactcgccgacttcgccgggctgaaatcccacgtcgccgccattaccgagcgcgcgatgcgcggcgaaatcgagtttgaatcggcgctgcgcgaacgggtggcgctgctcaagggcctgccggtcagcgtggtcgacgaggtgctcgacaagcgcatcacgttgacgccgggcggccgtgatctggtcatgaccatgcgcgcgcagggcgcctacacctgcctcatctccggcggcttcactttgttcaccaacgtggtcgcggccaaggtcggcttccaggagaaccgcgccaaccagctgcagatcgagaacggcaagctgaccggcgaagtgatcgagcctatcctcggccgcgccaccaagctcgccaccctggtcgaactcaccgaatccttcgatctcgacgacatcgacacgctggtggtgggtgacggcgccaacgacctcggcatgatccaggccgccggcctcggcgttgcctatcacgccaagcctgcggtcgcagccgcagccgcagtgcggatcgaccacggcgatctcaccgcgctgctgtacgcgcagggttatcggcgggacgagttcgtcgagggataggtagagtcgtcccggcgaaggccgggacccatactccgcggcgggtgccgtgaacgggactcatcattccaccatcgcgcaacaatcaccgcctgtggttatgcgtcccggccttcgccgggacgacgatcaggatggttcgcaattcaagacgtcaagcaacacggcgtcatcccccgctttcgcgggggatgacagttgtgggtgaggcgtcaggccgacgttactgcacgccgagcgccacgaagcgcagttcgccgtcgccgttggagaccagcagcagcacggacttcttgccgtcctttttcagctggtcgacgcgcttcttgatgtcggcggcactggagaccgcctcctgcgccacctcgacgatgacgtcgccggccgacagccgcttctcggcggcatcggaggcattgtcgacgccggtgacgacgacacccttcacgctgtccttgatcttgtacttggtgcgcaggtccttgctcagcgccgcgaggtcgaggccgagcgccttctgggtcaccggcttctcggccgtgtcgtccttcggcttggcgttggcctgctgaaccttgtcgttgtcctcgagccggccgagcgtgaccttgcgggtctcctcattgcccttgcggatgatgacgacgtcgacttccttgccgaccgcggtatcggccacgatccgcgacagatccttggggtccttgacgtccttgccgtcgaacttgacgacgacgtcgccgggctcgatgcccgccggcttggccgggcccttgtcatcgacgccggcaaccagcgcgccgcgcgccggcttgatgttgaggctgtcggcgatctcgtcggtgacctgctggatccgcacaccgagccagccgcggcgcagttcgccgaacttctgcagctggtcgacgacgccggccaccgtcttcgacggcaccgcgaaaccgagaccgatcgagccgccggtgggcgagatgatcagcgtgttgacgccgatcacctcgccgtcgaggttgaacaacggaccgccggaattgccgcgattgatggcggcgtcggtctggatatagctgtcatacggaccctggctgatgtcgcggttcttggccgagacgatgcccgcggtcacggtgccgccgaggctgaacgggttgccgatcgcgaccacccagtcgccgaggcggatcttgtcgctgtcgccgaacttgaccgcggtgagcggcttcggcggtttgaacttcaacaccgcgagatcggtcttcttgtcgacgccgaccagctcggccttgatcttggtgccgtcgttgaggatgacgttgatctcgtcggcatcggcgatgacgtggttgttggtgacgacgatgccggcggtgtcgacgatgaagcccgagccgagcgaattggtcttgcgcggctggaactcgccgctcttgtcgccgcccttgccgggcggcccgcggcggttcttgaagaagtcgtcgaagaattcctcgaacggcgagcccggcggcagctgcggcatcgcgccgcccttgttggcctcgatcgtctgcgaggtcgagatgttgacgacggcgtcgatcaccttctcggcaatgtcggcgatgccgtcgggaccgcgtgcgaaggccggcgcggagctcagcatgctcgcagcaccgatcgagatcgcggctcccatcatgcggaggcgacggctcagggctggtctggcagcgatcatgtcggagtttctccaggcaaacgggttcaaatttgctggtcgcagtgtgcgcccgtggtcgcagagtgcgcccgaacaggcatttggcgcaagcatctcagccgggcatttcggagaaaaaccggctgcgtgaggctcacgattatgttcattccggcgcgacctacgcgcttggaacaggcaatgctcagcgccgcaccgcccagatcaggacgagtcccgcgaccgccgaaccgatgccgacgacgcgcaggatgttgtccggcgtcgccagcgcgctcttcatcgcccggcgcatccaggcggggcttgccgcgaacaggatgccttcgagcacgaacaggattcccagaccgatgaggaagtcgccgaacgctattgacctcatcggatcgcaacctcccgctcgatgattgttgttatttaagtgacggcggcacgttgtccgcgccgccgttctgtcgtgaatttactgtttcggcgcagccgccgcctcggccggcttgccgttcgcgctgccgaagtacttgaagaattccgagtccggccgcaacaggaaccgcgtgtcgctggacttgaggccgttctcataggccgtcatcgagcgatagaacgcgaagaagtccttgtccttgccataggcctcggcgaacaggcggttgcgctcggcatcgcccgcaccgcgggtctgatccgcggcggagttcgcctcggcgacgatcacggtcgcttcgcggtcggccttggagcggatttcctgcgccttctggtcgccctgggcccggaactccgccgcctcgcgctgacgctcggtcttcatccggtcgtagaccgcttggctgttctgctccggcagatcggcgcggcgaatccggacgtcgacgacctcgatgccgtagccgtcggcttccttgtcgagctgctcgcgaatccgcgacatcagcttctcgcgctcgtcacgcaccaccgcgatgaagttgacctcgccgagcacgcggcgcagcgccgcgttgagcagcgtggtcagctgcagattggcggcctggatcgagccgacgctggtgtagtagcgcagcgcattcttgatgcgatagcgcgcgaaggcatcgaccacgagccgcttctggtcggaggcgatcacttcctgcgacgggttttccaggtcgaggatgcgcttgtcgacgttgatcaccgaattccacggcgccttgaagtgcaggccgggctcggtgacgacgtcgaccggctcgccaaaccgcaggacgatggtctgctcggtctgctgcacggtgaacaccgagctgtagccgacggcgagaacgatgaagagaacgatcagggacaggatgccggtgacaggggacctcatcgggtggctccctgctgctggccggtcgtggccggcgctaccgtcggctgacgccgcggcgtcagctcacccaacggaaggtagggtacgatgttctggccctggccgccgtcataaaccagcttctcggagccaccgagcacgcgttccatggtctccagatagatgcgctcgcgcgtcacgtcgggtgccttcttgtactcttcatagactttgaggaagcgcgcgctctggcccttggcctcggcgaccgcctgctccttgtagccctcggcggcctgctggatctgcgcggcacggccgcgtgcttccggcacgatccggttggcataggtctgcgcctcgttctgcttgcgctcgaggtcggcgcgcgccgcctgcacgtcgcggaacgcgtcgatcacctgcgccggcggatcgaccttctgcatctgcacctgcgtgatctggatgccggcgttgtaggaatccagcgtcttctgcatcagctcctgcacgttctgctcggtgacgttgcgcgccccggtcaggatcggctggatctgcgagcggccgatcacctcgcgcatcgcgctttcggcaaccgccttcacggtgccttcgggattttggatgttgaacagataggcgccggccccgcccggcttgatccgccacaatacggtgaagtcgacatcgacgatgttttcgtcgccggtcagcatcaggctctcttccggcacgtcgcgcatggtgcggccgcgccgtgcgggatcgtcgatcagggtcatgccgatcgagatcgtgttgacgcgcagcgccttcggcagcagcaccgtctcgatcggatatggcaggtgatagcgcaggcccggttgcgcatcgcgatcatacttgccgaagcgcatgacgacgccgagctcttcggactggacgcggaagatgccggtggcaaaccagatcgccagcgcggcgaccagcaccagcgcgattcccatgccgctgaaatgcccgccgggcagccattgctgcagccggtcctggccgcgccgcagcagatcctcaagatccggcggccttggcccggccgactgtggaccggtgccccacggtcccttcggacccgagccccatggccccccgccttgatttttccacggcatcaaacatctcctcggcaagtccggacgggacgcccgggctcgaatgtccggcccggttataggggaccgccagggcccttacaacgcaagcttcctgagccgacgagctatgcgccgggccacaattgtcaatgcaaacattggttaaccgcggccgcgccgacgatatgtcacataggagaagtcggcattgtcgtccggacctgccggattccgcacgcgcgcgacctcatcccactccctcgcatcgattgtgtcgaaccgtgtatcgccgtccggccgggcatggacctcggtaatctcaaggcgatcggcgatgcccatccactgcgcatagatctcggcgccgccgatgattgcaatttcagtggcgaaacgccgcagcgcatcaccaagcgcaattgcgcgggcgttttccaacgacgtcgtgacgatggcgccgcgcgcgcggtagttcggatcgcgcgtcaccacgatgttggtgcgtcccggcagcggccggcgcagcgactcgaacgtcttgcgccccatcacgatgggcttgttcagcgtcatcgccttgaggcgctgctgatcggatttcagccgccacggaattgcgttgccgctcccgatcacgccgttctcggcgaccgcagcgaggagcacgatctccatcagcgcgctccttcggcgagcgccgacagcgcaggaccggagacgcgacagatcgtccattcgtccaccatctcggctccgagtgatttgtagaatgcgatcgacggcgcgttccagtcgagcaccgcccattgcaggcgcgcccacccattggcgaggcagtgcttcgccaggtgcaccagcagcgccttgccgatccccttgccgcgcagcgccggacgcacgaagagatcttcgaggtagatgccgtggcggccggcgaaggtcgagaaattgacgaaccagaccgcgaagccggcgggctcgccgttccattccgcgatgtcgcagaacagccgcgggctttcgccgaacagcgcctcggcgatatcggcctcgctggcgtggacctcgtgcaggagcttctcgtacgcggcaagctcgcggaccagcgagtacaccagtccggcctcatcgggccgcgcgcggcggatcacgagcgacatcagaccgcgacttcggccttgatgtgcggatgcgggtcgtagccttcgagtttgaaatcctcaaagcggaacgcgaagatgtctttcacatcgggattgatcgccatcgtcggcagcggccgcgtcggccgcgtcagttgcaggcgcgcctgctcgaggtggttcgaatagagatgcgcatcgccgagcgagtgcacgaaatcgccgggcttcagcccggtcacctgcgcgaccatcatggtcagcagcgcataggaggcgatgttgaagggcacgccgaggaacacgtcgccggagcgctgatagagctggcaggacaattttccgttggcgacatagaactggaacaggcagtggcacggcggcagcgccatcttgtccacctcggccggattccaggcgctgacgatcagccgccgcgagtccggattgcgcttgatcatctcgatcacgttgctgatctggtcgatgctgcggccatcgggcgcgggccaggagcgccactgcgagccatagaccgggccgagatcgccattggcgtcggcccattcatcccagatcgtgacgccgttgtcgttgagatatttgatgttggtgtcgccggcgaggaaccagagcagctcgtgcacgatcgccttcagcggcagccgtttggtcgtcagcatcgggaatccggccgagagattgaagcgcatctgatggccgaagatcgacagcgtaccggtgccggtgcggtcatgcttctcggcgccgtcggcgaggatacgttcgagcagatcgtgatactggttcatgacgtctgtttcgggctttcgagagagcggcgaatgtagcggccaccgccgccggccgacacgccgattcggctgattagaccgattataccccgaaaagtgagcacccttgcgccaaacgacaagggacggaacccgcgttccgccctgccctatccatttgaccgcgctggattaacttgccggcttgagcaccggggtccatttcgcgatctcgttcttcacgagcgtcgccagcgcctccgggctgcggttggcgggtaccgggatcacgctgccgagttcgagcaggcgcttgcggacgttctcgtcgtccagcgccttgatcgccgccgcgttcagcgtggcgatgatggcgggcgaagttcccttcggcgcaaagatcgcgttccaggcctgagcctggaacgccggcaggccggcctcggtcgtggtcgggacgtcgggcagcgatggattgcgctcgggggtcgcgaccgcataggccttgatggtgccggcgttgatctgcggcaccgcgttgacgatctggtcgcacatgtaatcgacctggccggcgaccagcgcgttcatcgcgggtccggtgccgttgaagggcacgccgaccggcttgacgtcgaggatcgagttgagcaactcgcaggaggcgtgcgagaccgagccgatgccggcatgcgcggcgttgaccttctcggcattggccttcacgtaggcgatgaactccttcagatccttcggcgggaaatccttgcgggcgaggatcaggatcggcgtgcccgcaagcagcgccacgggctcgaaatccttctccggatgataggcaagcttcggatagagcggcacggacgcggcatgggtgcccatgtgtccggtgaccagcgtgtagccgtcattggcggcgcgcgccgcgcgcgtggtcgccgtggtgccgccggcgccaaccacgttttcgatgacgatgctctggccgagcgtctgcgccatatgcgcggtgacgatgcgtgagatgacgtcggtcggaccgccggctgcgaacggcacgatcatggtgatggtgcgcgtcggatagttctgcgccgacgccggcacggcgaatgcgccgagcgccacacatgccgaaaggcatgcgcccgcaagcgagcgaatggacatcatctcaattcctcccgggaacgttttgaccaataaaaatgccggccaaatcggccggcattttcatttcatgagacgacatcgcgagtcgattcgacttccgcctgcggcgcgccgacgcagggcttagagagtgatcagccctccgactccacgaacacctcgtcgcgcttcgcccgcaaggtgggcagcacggcaagcaccagcagagctgccgcaatcgccagcagcaccgccgaaagcggccgcgacaggaacacgctccagtcaccgcgcgagattaagagcgcacggcgcaggttctcctccatcagcggaccgagcaccatgccgagcagcagcggcgccggctcgaaatcgtgcttgatcagccagtagccgaccaggccgaacgcgcctgcgaggacgacatcgaccggcgcgttgttcaccgagtagatgccgatcgcgcagaacaccacgatcgaggggaacatcagccggtacggcacgcgcagcagacggacccagatgccaaccagcggcaggttgatgatgatcagcatcagattgccgatccacatcgaggcgatcatgccccagaccaggtcgggctgcttctgcatcacctgcggacccggcacgatgccatgaatggtcatcgcgccgaccatcagcgccatcaccgcattcggcgggatgccgagcgtgagcagcgggatgaacgaggtctgcgccgcagcgttgttggcgctttccggcgatgccacgccctcgatcgcgccgcggccgaaccgcgacggatccttcgccagcttcttttccagcgtataggccgcgaacgacgcgatcaccgcgccgccgcccggcaggatgccgaggatcgagccgagcacggtgccgcgcaggatcgccggcgtggagtccacgaggtccttcctggtcggcatcaggccggtgatcttctgctgcaccagattgcggtccatctccgcgccatggtcgaggttgcggatgatctcagcgaagccgaacacgcccatcgccacggtggcaaagccgaggccgtcggcaagctcgggaatgttgaaggccatgcgcgaggcaccggtctcgatgtcggagccgaccatcgacagcaacaggccgaacacgatcatcgcgatcgccttcagcaccgagcccttggcgagcaccaccgcgaagatcaggccgagcaccatcagcgagaaatattcggccggtccgaatgccagcgcgagcttggtcagcggcgcgccgagcacggcgatcagcacggtggcgacgcagccggcgaagaacgagccgatcgcggcgatcgcgagcgccggaccggcgcggccctgcttggccatctggtggccgtcgagcgcggtgaccacggaggtcgcctcgccgggaatattgaccaggatcgaggtggtcgacccgccatattgcgcaccgtaatagatgccggcgagcatgatcagcgcgccgaccggcggcaggccgaaggtgatcggcagcagcatcgcgacggtggcgatggtgccgatgcccggcaagacgccgaccagcgtgccgaccagcgcaccgatcaggcacatcagaaggttgatcggagagaatgcgacagcgaaaccgtgggcgaggttggcaaacagttccatcacgccctcactggatcaggaaacgcgggaacatcggcatcggaagtcccagcacataaggaaacaacagcgcgcagccgagcgtcaggcagccaccgacgatgatggcttcgagccacctcgtctcatgcgagccgagcgccgcgatcaggaaggcggcaaaggcggagacgacgagcccgagcggacggatcgcgacggcgaagaacacgattgccgccgacacgaacaacggcccgcgccaagaataggccgcgatctgcgggccgtctttcagaattccgaccagcgccacggcgccgccgagcaacagcagcagcacggcgaacatccgcggcgcggttccggcaccgaacgaaaatccgtgcatgccctgcaagtcgctcgaagcccacaaggcaaacagcgcaacggccaccatggcgagcccgccgacaaagtcctgcgggccgcgcacccatttcggcaagatcgatttgaccggcgcctcgctcggcgtatcgctcatgacttcgcttccccccgtcaggctgtccgcccgttttgattgaatggcttggcttgtggtgcgttgaccgaaagccttgctagcgattttcgtcagacaacgccagcaaaacccaagagacctccggcgagcaacatccacaaaggattgatccgcgtcgcaaaagcaagcgtggctgcgacaatggtgatcaggaccgcgatccaactttggtctgatgtctgcgccacgatcaggccggatgcagccatcaggccgatcgacagcggaaccaatgccgcctggatgatcgccggccagcgcgcgtcgcgcgagcgatcgaggaaacggctgacataataggcaagcagcgcggtcggtccgcacatcgcaaccgtcgcagccaacgccccggcaacgcctgcgacagaataacctatcagcgtcacgatcagcacgttcggtcccggcgagagctgcgagatcgcgaacacgtcggcgaactgcttgtcggtcaaccagtgatgtacgtcgaccgcggcgcggtgcatttcggggatcgccgaattggccccgccgaccgcgaacagcgacatcaaaccgaaggtccataccagcgccgcgaccgggttggactccctattcatgacttcaccatgcgccgggtcacgatcgtgatcgcgaggctgagcgggatcgccaccagcagcacgatctgcagcggccagcggatcagaccgatcgcgacgaagaccgcggccaggatgacgaggcctgtgacatcacgccgctgcaacagcggcagcatcatcttgaggacgacggcgaacagcagcccgaccgcggcacaggccacgccggcaagcgtccggcgcagtatgtcgacatcgccgtagcgggcgtagagcgcggcaaggatggtcgcgatcaccatcggcggcccgaccagcccggcgaaggccgcgaaggcgccggcgacgccgcgaaagcgcgaaccgaacacgaccgacaggttgacgatgttcggacctggcaggaaatggcacagcgcgaaggtctcgttgaactcctccgccgtcatccaacggtgctgttcgacgatcgcccgccgggcccagaccaggaccccgccaaagccggccagcgacatcttggcaaacgccaggaacagctcgagaagcccgggctggtggggtggagacggcgcggagacatccggcgccggggcggcaaccggcggggattccgggggcatggccaaaatctagaacggctccgggacgccggccaacccaaattggtgtgttttcacagcggaaagggtctgaatcggctctgtttttctacggctttgccgctatattgggggtgccggttcgccggctatggaaataaatggccgtcgcaataaaccattcggacccgggggcggtacccggcgcctccaccaaaacccatctaagcccccttcggtggcttttggcgggggcgaaataggatcgacgagggcgtaaagggcgtgttttttctcggtatggttccgccgttatcgggctaatgcaatagttgccaacgacaactttgctccggttgctcaggctgcgtaacgcagtttgaaagaccatcttaaagtcctaacgggttaagctccgttaggcggggttcggaggcacctggcaacagaagcctccactttattcctcgatcgggcgtccgcccgcatttcagccatcggccctgctgatttccggctcccggcggggtagcatgggggcaaagcgggcgagtcggatcatccggcgagcctcaccggctattttcgaagcgacaggatcaccatggcgaccgatcacatccgatatgacgtgctggcgcgcgatgcgctgcgcggggtgctgcgccgggtcctgtcggatgcggccgaacacggcctgccgggtgagcatcatttctacatcaccttcctctcgcacggcgacggcgtgaagctgtcaccgcggctgctcgcgcagtatccggaggagatgaccatcatcctgcagcaccagttctgggatctggtggtgaccgaggaccgcttcgaggtcggcctgtcgttcggcgggattcccgagcggctcaacgtgccgtttgccgcggtgacgcgtttcctcgatccgtccgcgccgttcgacctgcggttcgacgtctcggacgcgctgtccgaggaagcgcctgccgcaccggcagtggccgccccccctcccgcgccggctgcccgggccgtggtcgagcccgagacggccgagaccgagcaggagcccgcgaagcccagcgaaggcgccgaggtggtgcggctggaccgtttccgcaagaaataatctaaacgcggatctctcttcaccttgtaggatgcatgtgaggatcgggatgacagatcgtcatcccgtactatcttccgcatgaacgtgtctccgcgtggacgccttcgcgtcgtcacgctggaagaccggcgccatgccggaccacgtgctgatgacgcaacggagagcatccatggctcaatcgaccacaccatccaacgccgccacccggagcgagaccgacagcttcggtccgatcgacgtcgccgccgaccgctactggggcgcgcagaccgagcgctcgcggcagaatttcaagatcggccacgatcggatgccgatcgcgatcatccatgcgctcgccatcgtcaagctcgcggcagccgaaaccaatcgcgagctcggccagctcgacgcacgccgcgccgacgccatcgtcagtgctgccagggaagtgatcgacggcaagctcgacgatcattttccgctggtcgtctatcagaccggctccggcacgcagaccaacatgaacgtgaacgaggtgatcgccaaccgcgccaaccagatgctcggcggcgagctcggcgccaagcagccgattcatccgaatgatcacgtcaacatgagccagtcgtcgaacgactcgtttccgaccgcgatgcatatcgcggcagcggaccgcatcatcgccgacctgatcccggccctcgccgaattgcatcaggcgttgcacgcgaagcaggaggcgtttgccaagatcgtgaagatcggacggacgcatacccaggacgcgacaccgctgacgctcggccaggagttctccggctacgccgcgcaggttgagagcggcatcgcgcggctgcgcgtcgcggtgaaggagctgttcccgctggcgcagggcggcactgccgtcggcaccggcctcaactcgaagccggaattcgccaatctcttcgccaggcatgtcgccgagatcaccaggctgccgttcaccagcgccgcgaacaagttcgaggcgctggcttcgaacgacgcgtatgtgctggtgcatggcgcgatcaactcggtggcgaccggcctgttcaagatcgccaacgacatccgcttcctcggctcgggcccgcgctcgggtctcggcgaactgatcctgccggagaacgagccgggctcgtcgatcatgccgggcaaggtcaacccgacccagtgcgaagccatgaccatggtctgctgccaggtgttcggcaatcagaccacgatcaccgtcgccggcagccagggtcatttcgagctcaacgtctacaagcccgtcatggcatattgtatgataaattccattcagctgctgtctgacgttgtccgctcatttaccgagcattgcgttgtcggcatacgcgccgacgaaaagcgcatcaacgagttgatgcagcgctcgctgatgctggtgaccgcgctcgcgccgaagatcggttacgacaacgcagccaaggtcgcgaagtcggcgcacacccgcggaacgacgctgaaggaagaggctttgcggcttggatttgtgtctgccgatgaatttgatcgcctcgtgcagccggacaaaatgacacacccaggctgagccacgggcgcgcaatgtccggataattacggtcagcgcgcgtgatataattatggatcataacgcctaaagactaaggctgtttgcctatcagctctgcgctggcgcatggtacagacgtctagttttcgcagagcgaaacggattctttgatgctatcagaagcatcaaacggggattcgggatgggtatcgagccgggcgcgcagcgcgatcgctcttgctttcgtcacgatgcatcaccaattccgctttggggacgatgaggacgacgagcatgggcgacgtggtcaacctgaaacgattcaagaagcgcggcgagcgcgaacaagcagccaagcaggccgaagccaatcgtgcgctattcggtcgcaccaaatccgaacgagcgcgtgacgaatttctcggcgagcgcaacgcgcgagtgctggatcagcaccgcatcgatcagcagcgtatcgaaagtggtgacgcatcatgaagtctcccgtcgtcaagcgttcgatcgtcgtggccggtcacaagaccagcgtcagcctcgaagaagccttctggaacggcatgaaggagatttccggtctgcggaacatgacgctgtccgaattggtcggcgagatcgacagcaaccgccagcagggcaatctgtcctccgcgatccggcttttcgtgctcgactatttccgttcgcgcgctaccccggcggtgccgacggatgtcaggccgcagcaggtcgacacgcgccagcaggcctgacggccttcaccggccgtcgattgagcagacggccgttccgccgcgcggacttcagcatgaaggtcaatcgcatcgtcgcgaacattgccgcatccgacatcgcggcggcgaagtcgttctatcgcgacgtgcttggcctcgagccgttgatggatttcggttgggttgcgacttacggctcatccgaaacgatgcaggttcaaatcagcttcgcttccgaaggcggctccggcacgccggtacccgatctctcgatcgaggtcgacgacctcgatgaagccatgcgccggatgacggcagcccgcatcgcgatcgaatacggaccggcggacgagccgtggggcgtgcggcgcttcttcgtccgcgatcccttcggccggctgatcaacatcctccagcaccaatcctgatccagcgcgtcgtttgacgcgtctccttcgcgcgaaccagtgcccacttcgcttgaaaacgcggattagttctgcatcgccggtcgcgggggcggattggcgacctgcggcgtcagcgacaatggcgggcgcagcggccttggcctcgccgcgccgggcgccggcttgacctcgatcggcggcggcaatggcgccacctgcggctggctcgccaccggcgcgggcggcacgacggccggtgcggttgcaaccggcggaacgatcggcggtcgcggcgccacgatcttcggctttggggccacgcggcgcggatcgcgcccgggcaccggcacgtccgccggtggtatcgccgctgaatttgcgccgggcacgtcgggcgtcggctcggcggaaggcggcagggccgccggggtcggcggcggcacgggttcgccgcgctcgatcgcatcgagccgcctggtctcccgatcgatcgcgcgcaccgcgagccacgacgacaacgccgcaatgtcgatgctgcgcgacaatccgtcgggcgtgccgacggcgagcagctggatctccgggcggctgttcgcggtgccgacctgggtcgatgccagcgcggcgcgaatgtcggcctggtcggccggaatgtcatagccgccggacaggatgacgttggcaccattggccgcgagcgtggtggcaccgacccggatgcggccgtcacggatgttgaagggaatttgcgccgaagcgaccgatagcggacccgccgcgagcgccggttcgacgatctgccgcaaccgcgtatcgtcggtggcctgaccggaatcgctggcgcggatcgcgacgtcgaacgcacgcggatcgagccccggaaggttcagcccgtcgagcgtcacagtgccgctgccggacagcgcacctgatagcgccgaggcgctgcggccctgcgtcaacaacgtcatctgcatcgaagcgcgtgccctcggcatcgccagattgcggtagcgcaaggccgaagcgtcgacacccgacagctgcacattggcgttcagcgcgagcccgttgacgccctgccgcgcgtcgatggaggcagtcgcctcgccgccgccgatcttgcccttgatgccgtcgaaggtcagggcctgcccgtccgacctgatggtgccgctgaccggctgcagctccgcgccgcccggcagccgaccatgcagcgcttcgaaggtgaccttgccgcgccaggcgcttgtcagcccctggccgagcggctccgtcgcatcgtgacccgcgctaccgatcgcagccgcaaagatcggcgccagctcgatttgatcgaggccgacttcgccttcgaggctcttctgatcgccgagtgtcagcgccagacggccgcgcagccgcgaaccggcgacgatgctgtcgagatcgtcgaaggtcagtttgtcgcccgcgagcgtgagcttcgacgacaggcggatgttcgcggcgggatcggatgatttcagattgagcagcggactgatgtcggcgctgcggacgcggaggctgacgctggatttgttctcgctggccccgtccttggtccaaggctccgccgtcccctccgcatcggcgtcgagccccgcgccccagagtctcgccttcagccgcagcggcgcttgccacgcgccgctcacggtgacctcgaactgggtcgcgccggcgccggctgcgaccgcaccgtcaaggccgagcagcgccagcagcgcaccgccctcgccggcggagattttcgcctcggctgtcatgtcgctgcggcgaagtgcgtcgacatccagcgcacggatcgcagcgagcggcggcgtcgccgagatcaccgtattgcccttgagcggcggcgtatcgagatcgagcgtcgcgcgcgcgttgccgcgatcggcggtcttgcccttgccgagatcgagcacaagcctggcgcggaccgggccggcatccgcacgaagcacgccgagccgcgcggcgagcgccggcgcgaagggctgaacgacggcagtcagccgggcgagcgaggcagcggtcgcgtcgagcgtgagcttgccggtcgaattcgcacggtcgaaattgccgctgccgtccagcgtgacgttgtcgggctggccgatcttgacgcgctcgagcacgatactcttcgggttgtagacaatcttcgccagcagcggtcgcaattcctgccccgaggagattgcgcgcgcgacgtccagcgacagctgcgcctcatcgggccattcggcttgcggaccagccagtgagcggatgacggctgcggtcgcatcgagatccagccgctccgccttcaactgcgcctcgaccttcgatccgctcgccgcctcgcgatgcgcgaccgcgatgcggccctcgagcgcgccgccctcgacttccgccttcatcgcgtcgatcgaaaagcctgatggcgacaccgtgacgtcgccgcgcaggcgcagcggtttctggctgcgataggcgatgtcgctccgcccctgcagccaggtcatcagcgtatcgggatcggacgattcgatgttgagcgcggtcttgaagctgttagcggccccggcttgcgcgctggcgccgctcagcgagacccgggtggatcccggcgcgcgaaactccaaccggcgcacgatccatgatttcgcatccgattgcagctcagccgagatgtcctgtaatgggcggccaccgagcatgacctgctcggacgtgagctcgacctgcgccggaatcgggctttgcggaaggcccgacagcaccgcacgcatcgccggcagcacctgcaccggctcgacattgccgttgccgccatccttggtgccatctttggcggcgaacctgtcgccatcgagctgccgcgccgcaagggaggcgcgcagcaacggcgaggtaccgaaccggaggtcgccattgcccgcgagtttcagagcacggtcctcggcgccgtagctgacctcgatctggtcgagccgcgccgcggaatagtccgacttgaccttggcggcgatccgccacgacggcatgtcgctgccgccgcgctggcccggcgtgcccgccaacgtcactgtgccgtcgaaccgcggcgcgcgggcctcgaaggtcaggatgccgtcgagatcggccgacaccggccgctgcccgggatcgatgttgaagtgcaggcgggtgccgctgccgtcagcgctttgccccgacgagatccggaacgggtagcggttgccgtcgaacatgaaattgccgtcaccgcggatcgcgccggccagcgagcggacatcgccgctgaaagcaatgtcgttcagctcgagcgtgctgcggctcgcggcatcgtgcagcgcgacgcggccggtcagattgaggcggtcgatcgccagcgaagccaggttgaaggtcccgctcgacggcgaccagtcgatccgccccttcggatcgagcccgagatcgagcgacaggccgttgatggtgagctcgttggcgcgcacctcgccgcgcatcagggagctcaggctgaactcgacgtcgagatcggcggcgcggaccttgccgaggtcgttggcgctgccgacggtgacggatttcaaccgcagcgatggcgcgggcagcagacgcgcgtcaagattgccggcgacgcgaaccggcgcgccgatgatcttggacgcctccgcctcgaactgcggcctgaactggttccagtcaacgaaatacggaccgaccagcgcagcgaccagtgcaagaatgaaggcgattgccaggccgagcagcgtcgtctgcacggtgtctccctttgagcccgctccgcggcagcctcctcatgctgaacgctttgccaacccttggccggagcaacccaaatatagagacaagtatggcgaagtcacagcggctttaccgctgcgacgtcgggtggactacggatttccgctcaagcctgcgtgcgccggccgtcgcggcaggggcgctgccctgccgctcaaccgggatgtcaccagctcgcagggagccgcttcagcccgcgcagcacaaacgtcggccgccactccggattttccgcgtcatcgagccgcaggtcggggatccgccgcagcagggtcgagatcgcgatctcggcctcgattcgcgccagctgggcgccgagacagaaatggatgcctccgccgaacgacagcggcttcacgttcggccgctggatgtcgagcttttcgggatggtcgggatagacagcctcgtcgtgattggccgagcccagcaggcacagcacgctctcccccttcgggatgcgcttgccgccgagatcctcgatgtcttcaagcgcgacgcggccggtcagttgcaccgaggaatcgtagcgcaggaactcctcgatcgcgttggtgatcaggccgggattggccttcagcagcgcgagctgatccgggttgcgatagagcgcaagcagcccgttgccgatcaggttgacggtcgtctcatggcccgcgccgaacagcaggatgatgttggcggtcagttcctcgttggtgagcttctggccgtcctcctcggcctgcaccagctgggtggtgaggtcgtcgccgggctgcctgcggcgcagctcgaacagctggtggaagtacattgcggccatcacgttgccggcattgcccttcttgatctcctccgccgacagcggcaccggatcgagcaggcgtccgccgtcgcgcgagccggtatagaaggcctcacgctgctcctcggggatgccgagcatgtcgcagatgatggtgaccggcaggcggaacgcgaaatcgtcgatcaggtccatccgcccttgcggaatgatgcggtcgagcgtctcgtcgacgatctgctggatgcgcggacgcatatcctcgacccggcgtgcggtgaacgccttgacgacgaggccgcgcaggcgggtgtgatccggcgggtcctgctgcagcatccagtggctcatgctgcggaagaccggctcctccatgatcttcgggccgtagcggcggatcgtacgatcgacgtaatccttgccgaaccgcttgtcgcgcagcacgagactggcctcggcgtgccggctggcgacgaaggcgccgtgcgcattgacatgcatcggatcgagccggcgcagccgctcgtaatacggatagggattgcgaatgaattcgggtgccagcggattgaaaagcggctccccccccgccggctgaacttgctcgttcatggtgacctcgttcgctcgcggccccggtgcctccaccctggcgcgccttggtgtcatcctcaaggccgcacgattacggtgcggctgttctggttctgcaactcgatacactcttgtatcgagttgcattctgccctaaactgcgccgatgtcaagggttcgaaccagaccgacacgggacgacacctgcgagaagctgttcgaggcggcagcgcgggtgttcgaggaacagggcatcggcggcgccagcatcgagacgatcgcggcggcggcgggcttttcccgcggcgcgttctattcgaacttcaagagcaaggacgagctgatcatcgcgatgctcgaggaccacgtcgagcaatcgatccggcgcaatctcgatctgcttgccaagcacagcaacctgtccgacttcctggaagcgctgcgcaccgcggatcgcagccggcaggatccgctcggccgttcgcctctcctgcacatggagatgatcctgttcgtggcgcgcgccgagaagcgccgtcccgagctcgccaagcggctgcgcgcgcggcgcaagctgatcgccgacatcgtcgagaccgcgcagaagaatagcggcaggaacgccaggctcaacccggactggaccggtgcgatcgtgctggcgctggaagacggtttccgcctgcaccggctgatcgatccggagaccacacccgccgacagttgcctgcgcgcgatcaccgacctgcaacgcgcgatcggcgtgtcatccacctgatcttgcgctttagctcgtagcatgatcgtttcggaaaaccgcctcgcagttttccggatcatgctttagacggcgctggcgaccttgtgcatctgtccggcgacggcgcggaccttgcgaggcgacgcctgccagatcgcgaatgccgacagcaggctgacggcaatcccgagcaggaaggcgctggtgtagctgcccgagagatcatagagctggccggtgatccaggggcccgcggcgccgccggcgagcgcggccagcatcacggtgccgaagatgctgccgtaatgcttgccctggaagatttcgagcaccaccggccccatcaccgatgtcaggccatagccgagcgcaccctgggtgaagaccatcagatagatcagcgccatgctcggccagtatgtcagtgcagcgagcgcggcaaagcagatcacgaagccgaaacacgagatcgcccacacccattcacgaccgatgcgatcggacaggtgcccgagccagatctggccgggaatcccgagcaagctgacgacgccgagcgcccagacgccgacattggagctgaagccgatgtcgagcaggaatttggtctggtgcacctgcaccgcgtaccagatgtacaggccgcagaaatagccggtcgcgatccaccagaaccgcgcggtccgcagcgcgcgcggcagcgtccagtcgatgccggcccaggccggatcgacgatgttcgatgccggtttcgccgatgtggcggtcggcgccgcatcgccgtccggctgcaggccgatgtcttccggccgcttgtgcagcaacagattgatcggcgcgagcacgaccagcaccacgatccccatcgcggtgcaggcggtgcgccagccggcgtgctcgatcatgtgctgcacccacggcagcagcgtcaccgagccgatgccgacgccggcgaaggcgagtccgatcgccagcccgcggcggcgaatgaaccagttcggcacgaacagcgattggccggaatagccgaggcagacgctgccggaaccgaccagcacgccgatggtaagatagaggtgccagggctgggtggtcagcggcgccagcaacaggcccgatcccatcagaagcacgccaagctccatcaccgcgcgcggaccgctgcggtccatcaggcggccgatcagcgggcttgcgatcgcagacgcgacaaagccgaacgagaatgcgccggccgtgatgccgcgctcccagccgaactcggagatgatcggcggatagaacagcgagaacgccgttcgcgcgttgaccccgatcgccatggcgacgaacgtcaccgcgacgatcacccagccgtagaagaatggaagccgcatgaccaccttgtgtcagacctgaattgaactgtcgatgcccgcgatatccatcagccacccagcgcgtggcttgcatggccgaaataggcgcgctcgagccggtgcgcgagatcgctttcgctggtcggggcctccagcgcgattgctccctgcaccagcgcgtaaacacgatccgcacatgccagcgccttctcgagcagctgttcaaccagcagcacggaggtgccctgcgcgcgcagccgcccgatgacgttgaggacgcgatcaaccagcaccggcgacaatcccgccgagggctcatcgagcatcaggagccgcggccggcggaccaggccctgcgccaccgtcaacatctgctgctgcccgcccgacagcgcgccgccgcgctcatgccgcttctcggcgatctcggggaagaacgacaaggcttcctcgacgcgcacgacgcgctcggcacgcggcaggtcgtagccggcgagcagcagattgtcggcgaccgagatctgcgtgaacacgcgatggccctcgatcacatgcacgagcccggcgcgcgcggcatcgcgcggcgtggcgttggtcatgtcgtggccgccgaaccggacctgcccggcattgaccggcaacaatcccgacatggcgcgcagcagcgtggtcttgccggcgccgttgggaccgagcagcgccacgacctcgccggccgcaatcgtcatgtcgatgccgtgcagcacgcggatcttgccgtagccggattccagcgcgctcacgttgagcaggggttcaaccaccgaggtaggcactgaccacctccttgtggacgcggatctccgccggcgttcccgccgccagggtgcggccgagattgagcacggtgacctggtggcagatatcgaagatcagatcggcatggtgctcgaccagcagcactccggtgccgcggccgcagatcgccttgatcagggtcgcgagccgcgcgatctcgtcgttggagaggccggctgcgggctcgtcgagcagcaggaagtcgggatcgagcatcagggcgcgcgcgatctcgatgaagcgcagctcgctgtgctgcaggcggtcggcgcgcacatcggcgagcgcctcgaggccgacgacgccgagcagcgcgcgcgccttggcggcgagcagtcgctcgtcggcgccgttgcgcggcagcgcgagcatcgcctcgacgaaattggccctgccctcgatcgagccgccgatcatgacgttctccagcaccgaggcttcgccgatcacgcgcggcgtctggaaggtgcgcgcgatgccgctggctgcgcgcttgaccggctgccccgcgggcaacatctcgtcgccgagggtcatggtgccggccttggcggcgtagtagcccgagatcacgttcagcgtggtggtcttgccgctgccgttcggtccgatcaggccgtggatctggcccggcgcgacatcgaggtcgaggccgtcgattgccctcacattgccgaagctgagtgcgatgccgcgcagctgcaacgccttgccgccgtcgcgccgccgcacgatgtcggcgagcgcggccgggcgcggcacgatcgcccgattgctggcgagcggacggcggttgcggaagtcgagcagcgccgcgatgccgcccggcatcaccagcacgatcaagagcagcagcaccgcgtaaaggaaggtcgaccaggccgcgagcggcgcggcgatctcgggcaggatggtcaggatgatggtgccgagcatcggcccgaggatcgagccacggccgccgatcaggatcgcgatgaagaacagcaccgagagatcgaacgtgaacgcgtcgggcgtgatgtaagtctgcagggacgcgaacagaccgccggcgatcgccgccagcgcacccgcgaacaggaagatcgcgatcagcatgtccggcttggagatgccgctggcctcggccgcgacctcggcgtcgcgcaccgcgatcagggcgcggccgaaccggctgcgtgcgacattggcgctcaaccaggtggtgccgaccgcaaagccggtgcagagagcgtagaacccccacggcgtgttgaacggcgccgggaattcgggaccggcgatgccgatgccgccaccggtcacgctctgccaggccagcgcgatctgggtcacgatggtcgcaaagccgagcgtcgacatcgcgaaatagaaggtgcgcaggcgcaaggccggcaggccgacgaccacgccgaacaccgcgccgatcaggccggcgaccggcaatgcggcgaacaccggaagcgccggcatcacattgccagcgaccagcacgctggtcgcgtaggcaccgagcgtcagcagcgcgacatagccgatcgcgagatgaccggcaaagccgaccaccagattcagtcccgacaccagcacccagtagatcgccatccgggtgccgatcagcacccagtagtcattgctgacgaagggcagcagcacagcggccagcaaaatgccgacgaatggcagaacgtgcggcagcgtcgcacgccatgcgccgcttccggtctgtggctgagtggtggcgaccgccgtcatcacactctccgcgcggtcgagctgccgaacagcccctgaggagccgcgagcagcaccacgatgaacagcgtgaacaccgcgaccgaggagaagatgccgccgaccaggaagttcgcggcctgctggaaaaggccgagcgccaatccgccaatgatcgcgcccctgttgttgccgagcccgccgagcgccaccggcacgaagccatagaaattgagcaacgcgccgttggcgaagaaggccagcagcagctgtccgcccgaaaatccggcgatgccgccgaccacgccggcgagcgcgtagctcgcgacgcgcaggttgcgctccggcaggccaagcgcccgcgccgcaaaattgtcctccgcgatggcgaggaaggcgcggccgaccagggtgcggcggtagagatattcgaggccgataatggtgaccgcgcaggctgccaccggcagccagaacttttcatccagcacgccctcgccgaatcctgcgatgcgcgggaacggctgcggctcggtgccccatttgatcgcggtgacctgctgaatcatcagcgcgaccgccagggtcgagagcacgtaaagatgctggtcgaggctcttgagcaccggccgcaccgcgacgaattcggtgatgatcccgatcaccgcgcagcagagcaacgtcagcacaaagcctatggcgatcggcaggccgagcttcagcgtgaacatcgagccgaacacgccgcccagcatcgcgagctggccggcggtgaagctcatcacccgcgaggtcgagaacatcgtgttgtaggtgacgccgaccagcgcgtagatcgcgcccgccgcgagaccggatgcgaggatcgaggccagcatcggctacgccctcacccgtctatgtataccccggcgccagcgcgaaggtgccgttcttcgcggtgctcgattccgacatcacgatctcttcggtcagatagccgttatgctcggtcggagagaagcgataattgccgaaatagccgggataggtcgacagcgagttccagtatttgatgatcccggcgctatcggtcgagccgctctccgcgaccgccttggcgatcaattcgatgcaatcgataccgccagcaatccaccacagcagcgtatcgttcagcgcgacattggccttggtcagccgcgcgaccaggtcctcgctcttcggcggcagcttgccggcgctgtcatagctgcagctcttgtagccgatcgcatagaccttcttccagttctccggcttggcgaccaggctcgcgagttcgcccgatgccatcgagggatggccgacgaacggaacgtcccagttcatcgcggcgcgggtgttgaacatccgtgcctccatcccggtcgagacgctccacaccacgatcgcctcggcgccggcgttcttggcgcgcagcatgtccggcgtcatgtcgggctgcgtggaatcgacattggcctgatacacgacttcagcgccgtccttcttgaacgccgcgacggaggcaccgaccgcggtgacgccatagccggtggtgtcgccgatcacggcaaccttcctggccttgaggatcttgaggcaataattgcgcacggcatcgtcccactgactgttcgacggcgcgatgcgaaacgcattggggtacttcaccggatcgatcagggtctcgaccacgcaggggtgcaggtcgggcattttggcgcgcgccatgatcggggtcgtcgccaacgcttcgccggaattcagcggcccccagatcgcatggaccttggcctggctgatcagctcctgcgtggcgttgactgccttggtcggatcgccctgggtgtcgcgcatgacaagctcgatcttgcggcccttgacgccgccggcgccgttgatggcatcgaccgcgaaattcacgccgcggttgaagccgacggtcggcgccgagctcgggccggtgatcgccgcgagacagccgatcttgatcggctccgattgtgcgatggcaggcgccgggaaggaaaatgatgcggcgcccaatgcgccggcgctgcccaacaagacgtcacggcgtgacatggccatgtgatgcactccctgtttccctctcggcgcccgtcgtttgctgcgggacgtccattgcttgattgtccgcgcgctcatggccgcggttattgcaagctcaagtttgggctggatgcgaagctcttgtccagccccgcggacggcattgcgccttgttgaactttcatagccgcggccgccgcgtccagtgctcggcattcacggcgccgacgggcacctcgcccgcggcgatcttcgccacctggcgcacggtctccgacgactgatgctcgatcgcctgcggcgtcaggccgccgacatgcggcgttgcgatcacattgcgcagctccgcgagttccggcgacggcatctggtcgggcgcgcggccgacatccagtgcggcgccggcaatgccgccagcgcgcaacgcagccgccagcgccacctcgtcgacgagattgccgcgcgacaggttgatgaagaacgcgtgtttctgcatccgcgccaaggcggccttcccgatcaggttctcggtctgcgcattggcgatcgcaaggcagacgacatagtcggcgcgcgccagcaggtcgtcgagcggaagatgcgcgatcgcggggtcatcaatggtcgcaaagggatcggcgaccagcacgttcatgtcgagcaccctggcgatccctgcaagataacgcccgatgctgccataaccgatgatgccgatcgtgctgcccgccagctggcggcccatcacgacttcgggcgccccgcccgcgtgatacgcggcggtggcgcgggagacgccgcgcgacagatcgaccatgaagccgagcgcaagctcggcgaccgactgaatgaagccggcgctcgcctgcgtcaccagcacgccggcggccgatgctgccgcaacgtcgatgttgcggatatcgaccgcacagcgcacgaaggcgcgcagtttcggaagccggggaaagatctcgccgggtccctgggtcatgcgatcggcgacgatgatatcgacatcggccgcagcctcgaccaatgccgccgcgtcgagcgcctcgtccccgtcgtgcagcctgacgtcggcgaccgcgcgcaggccgttcaggctgcgctcgccgtaatagtcgcggcgcatctgcggggtgtgggcgagaagcaccttcacgatcgtctccctaatagcccaacgcatgcggcagcgccgtgctgatggcgggcacgaacgcgatcaccagcaggcacagcaacagcaggccgagatagagtgcgatcggcttgatggtctgctcgatcggcacattgccgatcaggcaggcgccgtagagcccaagaccaagcggcggggcaaacagcccgagccccatcgcgatgaccagcacgacgccgaaatgcaagggatcgatgccaagcttgacggcgaccggcaacagcagcggcccgaagatgatcagcgccgcggcgccttccagcaccgagcccatcaccaccagcaccaggatcgacagcagcatgaacagccagacgccatggctgcccgagatcgccagcatgagctcgccgaccgcgtgcggcacctgctgcagcgtcaggatgaaggcgagcgactgcgcggcagcgacgatgaacagcaccagcccggatcgcacggccgattgcacgaagcaatgcgcgaggctcttcatgccgagctcgcggaacagcaggctgccgaccgcaatggcgtagaccgcggcgaaggccgagatctcggtcgcggtggcaaagccgctcttgaagccgaagaagatcatgaagatcagcccgaacgaggcgatcgcgccggtccacaggcccgagaccgtcgcccgcggctcggcgtcgccgctcgcctcagggcgcttgccgaagatgatcgacaccgcgatcagcgccagcgccatcagcgcggccggcagcatgccggcgacgaacaggccgccgatcgacagattggcgacgaagccgaggatgatcaggttgatgcacggcggaatggtctccgccatcacagcggaagcggcgagcagcgccaccgcgccgcccgggttctgccgcgagcggcgcgccgccgggatcagcaccgagccgacggctgcgacgtcggccatcttggagcccgagatgccggagaacagcaccatcgacatcaccatcacgacattgagcccgccgcgcatccgcccgaccgcgcgctgcaacagctcgatcaaccgcaccgacatgccgttggcttccatcaggtagccgaccaggatgaagaacgggatcgccagcagcacgaaattgtcgatgccgcgcgccatctgctgggcgaagatcacgccgggcagcgtgccctcgacccagatgaagatcaatgctgccagcgccagcgcaaagccgatcggcagtccgccgaacaaggtgaggaagaagccgatcagcatcagcgtctgcgacgatggcacagatgacggcgcaaacgcatcccaggcgagataaatgccggcgacgacggccgtggcgacgatgccggccagcatgtcgcgcaacggccggccgcagaacgtctcgaaggcgaacaccgtcatgaacgccgcaccgatgcccatcggatagaacgtccactccagcggcagcccggagccggacgtttgcccggtggtcagccagcccatcttgacggcgttgaacgcgacggtgccggcgatgatggtgacgagcagtgcaccggccgcgtcgacgacccgccgcaccgcttgcggcagcatgtcgacgaagaaggcgacgccgagattctcgctgcgtgcgagcgcgctggccgcgccgaagaagctcgacccgaccatcaggccgcgggcgacgtcgtcggaccattcgaccggcgcgttgaacaggaagcgggccagcaccgagacgcagaccaccaggagatcggcggcgagcaggatcgcggcgatggcgtcactgacggcgagcagcggcgccgtgatccgatcggggctgcttctcgtcgcaatcgcggcgaccgacatggccgacctcaggcctgggtggcgcggatcagatcgacgacagccttggcctcgggccgcgccttgatgaaattgtcggtctgcggcagcacgcgcttgcggaacgcttccttgtcgcactcgaccaccgtgacgcccttctccaccaggctcgccagcgcctccttctccaccgcgagcccatgcacgcgggtgtccgccgcggcctgctttgccgcatcgagaaagccttcgcgcagcttgggggccatgcgattgaaggtggtgtcgctgaaatagaccgcgagcggcgagaagatgtgctgggtcagcgcgtaatgtttcgcggtctcgtagaacttgctggccaggatggtcggcggatcgtgctcgaggccgtcgagcacccccgcctgcaatgcggtgtagatctcgccgaacgccagcggcgtcgccgcggcccccatcaaccgaaggcattcggtgatgatcgggttgggcagcgtccggatcttcaagccggcgagatcttccggcgtcttcaccggcttcttggccagcacgctgcgcgcgccgaaattataggcccagccgatgatgtggatgccggcgcccttcagcagtgcatcctcgatcggcttcgccgcgccggcatcgaacgccttggtctgctgctggtagctggtgaagaggtagccgaggtcgaaagtgccgaccagcggcacgaggttggccgagatcgacgagcccgagaccatcaggtcgatcaccccgagcttcaccgagttgatgacatcgatctcctggccgagctggttgtcgggaaagaaggtgacgtcgatctgctcgccgagcccgttggccttcagggtcttgacgaggttgtcgtagtagacgcggccgttggcgtatttggggtcgttcggcagcgacgacgagcaccgcattttcatggtcgcggcgtcggcgcggccgatgatggcgggcgcagcgacaagccacgctgcggcagcggccgatgaccgcaacagaatacggcggctcacgcgcatcgacgtcatgatgaagctcctccccaggaacggatcgtttattgtgtcggccgcgacgctggctggcgccagcttggcagaccatttgtcataatgtatgacaaatgaaatgcagttgtgcaagagccggctcggcgccggcaccaaccccagcgaggcacccgatgttccagacatccaacgcgttgcgtcggagcgtgcacagccaggtcgccgaccgcgtcggcggcagcatcgtgcgcggcgagatcggcgtcggcgagacgctgccccccgaaattcagatctgcgagatgatggacgtcagccgcacggtggtgcgcgaggcgatccgcaccttgaccggcaagggcctgatcgagtcccggcccaaggtcggcacacgggtgcggccgcccgagcagtggaatcagctcgatcccgacgtgctgcgctggcgcctcgagaccacggagatcgatcgctatctggcaaaactgttccagctgcgctccgcggtcgagccggccgccgcggcgctggcggcggcccatgcgggggacgacgacatcgcccgcatccgggccgggtgcgacggcatggacgcggcgaagacaaatgaggacttcgtcaccgccgacatcgccttccaccaggcgatctatttcgcgacccgcaacgagttcttctggccgatcgcacagatgttcgagatcaccctgcgccagagttttacgatcgcagctcccggctcgcatcgcccgcgcgcgctgatcgaacaccgcgcagtgctcgacgcgatcgccgccggcgatgccgaggccgcgcgcgccgccacggtggtgctgctggcgcattccgccgacgatctggtgcggattcggggacgggagttcgagacgacggcgaggaggcctgcgcgcaagcggtgatggcagcgaaactctctccccatcgtcgttcttgaagcgacgctgctatttcgagcgcgccaccgtggtgccgtcccagtccccgccggccggattgtcgagctggtgttggcaccgcgcgatcatctgcgtcgaggccacgtccgtaccgcggagtttcagggtcctctcgaacgcagcgatcgctgcggtgaaatcaccggcgcgccaggccgaaagcccggcctcataggacgcgatccagtcgcgcgcgatcgcgccctcgtcggccattgcgagcaattcgtagatctcgagcccgccagcgcggccgtagacggcgagacggtcgagctcgcggacgacgatgcggtcaccggccagacgccgtgtctccggaccgatgatgatggtcgatccatagaccttgttggtgccctcgaggcggcttgcgatgttcacggcgtcgccgatcacggtgtagttgagccgcacctctgagccgatattgccgaccagcatgtcgccggaattgatgccgatgcggatgctgaccgcctctccgctgtcgtcgacaaggccggcctgcgcgaccgcgcgctggcaggcaagcgccgcccggcagcaatccgtggcatgatccggattggccgccggcgcaccccagaacgccatcacggcgtcaccgatgaacttgtcgatcgtgccgctctcctgctggatcgccgcagagacgatgtcgaagtagcgcgacagcaaggggatgatgcgatcgccgagccgctccgacatgccggtgaaacccgcaaggtcgacgaacatcacgctcatcggccgcaccgcgccgccgagccgcgcgccattgccgtcgctgaccagccgccgcaccagatcggccgggatgtatttgcggaacgcggcgagcccctgcgccatgtcgccgatcgcacccgacaggttctcgatctcggcaaggcgcgacggatgtcgcgcgaccttgtcgaggtcgaagcgctcgacatgcctgatctcgccgaccaccttgatcaggggcgccgcgatcaggcgctgcgccagccaggccgacaacagccccgcggccgcgatcagcgccgcgagcccgatcagcaggctgcggatggtcatccgcaccgggccgaggaattcggattccggcaccaccgtcaccagcgaccagcccggaaacgagatcggcgtcagcaccgcctgataggcctgcccgtcccgcgtcacctgggaacggaacgcttcgccctcgccgggatcgtaggccttgccggcctgcctgatcgccgcgaccgcgaccggcagcagcgggtggtcggtcttcagcgcattcagctcgtcggcgtcctgatccggcgacgcgatgacgccgccgtcgcgatcgagcaggaaggcgcccgcggacttgccgaccgtgagttgcgacaggaagttcgagacccgggtcagttcgatgatgatcgcgagcacgccggtgcgctcgccgtcgacgtcgatcggcaccgccagcatcgcggccagccgctcgccgcggggcagcgtcgtcagcgtcgaccattgctggtcgcgggctgcgatcgcatcgcgaaaccagggctgctccgtgaccaggtatttgccgtcctcgacggtgctgcccttcggcttgatgtcgatgccggcataatcgtattgatcggcccgcagcttgcggtcgggcgagatggtcagcatctcgacgccggcgtcgccgagcttgtgggcgccgaaaaacgagccgtccggccagccgaacgcgacccacgagatggtcggttgcgactgcaattgcgacaggaacacgaactgccgcttgcgcacgtcgctcgcatccagcaccttctcggtcaacagcgtccgcaccgccgtcatcgacgagcgcgcttcggtcgtgatcgactgcaactcgtcgccgaccgcggagacgatctggtcgttgatcgtgtcggccagcgtctggctgacccgttgtgcggtgcgccaccacaacagatgcacgccgacggcgctgaccaggatcgaggtcaggaccagggcggagatggcgctgcggatgccaatgcgcatcgatgaggtccggatcagcggttgctgtaccgcattacggaacatatccgcgcttgtttcaccagcgctgaacgcaatgcagcccccggacacgggcctgtgaccatagttgaatgcatctgcgacgaaacttctggattgttggcagcgtacacgccaagacaggacagccatcttcgaaggttccttgatgcacgacatcacgattccggccgccttgatcgccggcctggtcagcttcctgtcgccctgcgtgctgccgctggtgccgccctacctgatctatctgaccggcgcgaccatcgagcaggtcaaccaggacggcgccaccgcggcttccaagcgcgcggtgatgaccgcggcgctgatgttcgtgctcggcttctccaccgtgttcgtcgcactcggcgccagcgcctccatcgtcggcgggctggtgcgtgcttggtcggccgagctctcgatcctggccggcatcgtcatcatcatcatgggcctgcacttcctcggcatcacccggatcggcctgttgatgcgcgaggggcggctgaccgcgcccaagccggtcgggttgtggggcgcctatgtgatgggcctggcattcgctttcggctggacgccgtgcatcgggccgatcctcgccgcgatcctctcgatcgccgcctcccaggccacggtgaccaagggtgccggcctgctcgcagtctattccgccgggctcggcatccccttcctgctcgcagccttcctggtcgagcagttctcctcgctgttcgcgcgcatgaagcgccatctcgacaccgtcgagcgcgtgatgggggtgctgatggtggtcaccggcatcggcttcctgaccggcgcggtgtcgggcgtcagcgtctggctgctggaaaccttcccggcgctgcaaaatatcggctagcggcgtaacaacctggcctctccccgcgaaactcctgccaagacgcggccgtaacttttggttcgtgccatttgacgccgttcgtcctgaccgcctgcgcagacggcacagcgagatattcgggaggggtttcgcatgaatttcatcgtcaacctgctgatcctgctgccggcgcggatcgcctcgcactttgcctgggccggtccactgctcatgcggatcatcgtcggctacaccttcatgctggccggctggggcaagttcaccaacctcgcccaggtcaccgagaacttcgcgggctggggcattcccttcccgaccatcctcacccccttcgtatccggcgtcgaatgcttcggcggcgtgatgctgatcctgggcctgttcacccgcatcccggcggcgatgctcgcggttgtcatgatcgtcgcgatcaagtccgcgaaatggggtgacgtcgactcgctggagacgctgctcgggttcgaggaagcgacctatttcgccgccttcatgtggctcgcgattgccggtcccggcgccgcctcgctcgaccgcctgctggtcaacctgacggcgggccggaaggagccgacctgagaggcgtccctcacaatcccgtgacgtggcgagccccggtctcaatcgacgcgtagctggcacaaccaagcgctcaccgagggcccgccatgtcattcgtccgcctcgccgccgttctcgccgtattggccgcatcgcctgcatgggcggccgacagtccggcatggagcggctggagccacgatctgttcgcacgcgccacgaccgagaagcgcttcgtcatcctcgatctcgaagcggtgtggtgccactggtgccacgtgatggagaaaacgacctacgccgaccccaaggtgcaggagctgctggcggcgaaatatctcccggtccgcgtcgaccaggacgccaatccggacctctccagccgctacggcgattggggctggcctgcgaccatcgtgttcgcgcctgacggcagcgagatcgccaagatcaggggctatatcgagccggagcggatgcagtcgctgctcaaggcgatcatcgacgatccctcgccgggcccgtcggtcggcgaggccttcgcgatcaagcccgccgcgtcggcctttctcggcaaggcgcaacgcgccgaactgaccaagaccttcgacgaatcctacgacgagacgctcggcggctggggcgagaaccagaaatatatcgacgccgacagcctcgaccttgcgatcagccgggccgaagccggcgatgccgccgcgacgacgcgcgccagacggacgctggatgccgcgatcgcgctgatcgatccggtgtggggcggcgtgttccagtattccgaggccggctcgtggagccatccgcatttcgagaagatcatctcgttccaggcgcaatatctccggcaatacagccaggcctatgcgcaatggaaggacccgaaatatctcgcggcggcgcgcgatgtcgagcgttacctcacggaagtgctgctcagccccgacggcgctttctatgtcagccaggacgccgatctcaatcacgacgtcgacggccatacctattatgcgctgccggatgccgcgcgccgcaagctcggcctgccccgcatcgacacgaacctctatgcacgcgagaacggctgggcgatctcgggcctcgtcgcctattacgacgcgagcgccgatcccaaggcgctggcgatcgccgagcgcgccgcgaaatgggtgctcgccaatcgggcgctgccggaccgcggcttccgccatggcgacaaggatcgcggcggcccgttcctcggcgacaccgtggcgatgggacaggcgctgctcgatctctacgccgcgaccggcgatcgcgactggctggcgtccgcggcaaaggccggcgactttgtcgcgaccttccgcgacgaaaccggcggcttcttcacctcgaaaacgtcggagggaacggccggtgtgttcgcaaaacctgcaaaactgatcgacgaccagatccaggtcgcgcgcttcatgaacatgctcaatcgctacacgggcaacgaaggcacgcgcgaacaggcggcgcatgcgatgcgctatctcggtgccgcatcggcagagatgccgcggccgatgcctggcgtgctgctcgccgatgaagagctggccaccgagccgacgcacattacaatcgtcggacacaaggacgacgcccgcgcccaacgtctgcatgcgatcgcccgcgccctgcccgcccgctacaaaaggctcgaatggctcgatccgcgcgaaggcaggctgcccaatcccgacgtcgactatcccgacctcggcgagcccgcggcctttgcctgcggcaaccgcatctgctcgttcccggcgttcagcgccgaggaattacaggcgaacgtggcacagatggcgaagctgaagccggcgcgcgccgcgcaaaactgattaaaataccgactgtgcagtgcagcaggccgatcggctcggcgcaacgaaatactctttggccgatggtgtttgatatggaccgggcgtccaaccaggaccaaacaaaattttcttttgaaacgctgtaaccaaatcgcctgataccccgtagctgatcctggacgagcactcaaatcgcgggaagcaccgcgccgcggacgcccctgcgatctgattgttctccgaatgtccatccgttgtgcggtccgggatcgaacgatcgtcggatgctcacggcgccacgttcattgttttcaaacaatcatcgaggagatcgtcatgaagttgagttcgaagtccggcgcaacgcttgccgtcgccgcggccaccctgttcctcgccggctccgtggtttcgaccacctcgacggccgcaaatgccgccacgggcaagtgcatggccggcaatgcctgcaagggccagagcgcctgcaagggcggcgccaactcctgcaagggcctgaacgcctgcaagggcaccggcttctcgctgagctccgaaaagcagtgcaacgcgatgggcggcaagttcgtcaagggctgatcgcatcgtcccaagagggcccggcgactgcgccgggcctttccaccgcacgacgcggattaatgattccagcatgggtaaccaaagcggaccatatccgtagctatctttgggtgcagccttcggccaactcacacggtccgcaggcggcgcaccttcaaccatcttgcacaaggagacgcacatgaagcttacaaccaagtcgggtgccacgcttgccgccgccgctgcgacgcttttcctggccggagccgtggtgtcgacgcagtcctacgctgccagcgaaggcaaatgcgttggcgccaatgcatgcaagggccagagtgcctgcaagggcggcaatcacgcttgcaagggtcagaacgcctgcaagggtcagggctttgcggagatgacgaaggccgactgcaccgcggcgaagggcaagttcaaggccgggtgaacggatcagaccacgcgggggcccggtgtaggccgggcctcgtttccatgatagttttctgaagttgggcgccacgatcccggcgccggaagcgcggagcggccatgaacgttgcgagccgatcaccggacaagtcggtgctcgcagagcgcccgctgcaatcggccaagccgcccttcctcggcttcggcctcggcctgcgcgcgcagcattatgacgagatcctcaacggcgatccgccgatcgactggttcgaggtgatcagcgaaaactacatgttgccgggcggccagccgctgcgcatcctcgaccggatctgcgagcgctatcccgtggtgatgcacggggtttcattgtcgatcgcctcgaccgcgccacccaacttcgactatctgcagggcctgaaggacctcgcacggcgcgtccagccgaaatggctgtcggaccatctgtgctggaccggtgtgcacggcaagaacctgcacgatctgctgccgatcccctacacgcgggaagcgctcgatcatgtcgtgagccgcgtgcagctggtgcaggatttcctcggccgcgccatcgtgctcgagaatgtctcgacctatgtgcagttcaacaattccgagatgacggagtgggaattcctctccgagctgtcgcgccgctccggctgctggctgctgttcgacatcaacaatgtctatgtcagcgccttcaaccatggctacgacccgatggccttcctcaacggcattccacccgatcgcgtagtgcaattccacatggccggccacagccatatggggacgcacatcatcgatacgcacgaccatccggtgtgcgaggatgtctgggacctctatgttgcagccttgaagcggttcgggcacgtctcgaccatgatcgaacgcgacgacaacatcccgccgctcgacgaattgctgctcgaggtcaagcggacccgcgagatcgcggagcaaatcctgcccgcgagagcgccggcgcaatgagcgaattcgcgcgccagcagagcgactttcagcgcgccatcctgaccgatgacgggagcgtcttgtccgaaatcctcgacagcccgcgggagaatcgcgagacgctgctcggtgtttaccgctacgcctatggctcgcggctggtggaggcgatgcgcaatgatcacgagctgctgcatcgctttctcggcgacgagatgttcgacgacatgggccatgcctacgtcaaggcaaggccgtccgagcatccgaacctccgttggttctcgcaagggctgccgggcttcctgaagtccacggagccgtacagcaaccatcccgtgctcgccgaccttgccgcgctggagaaggctttgaacgacgcgttcgacgccgccgagggcgccgtgcttgctctggaggccatggccggcttcgcgcccgagacgtggaacgacctggtgttccaaccgcatccgagcgctgcccggatcgacctgtcgaccaatgccgtcgcgctctggatggcattgaagaacgatgaggcgccgcccgaagtggagacgctagccgggcctgcgcgcgtcctgatctggcggcaggacgccacgccgatgttccgcgagctgccgaccgaggaagcgatgatgtgggacgaagcctccgccggcattccgttcggcgtgctctgcgagatgctcgcgacctatgacgatcccgataacgccgcggcgcgcggcgccggctatctgcacggctggatcacggcgggactgctgacggcggcatccattcgcgaataggggcgcggcatgagcgccgacatcgtcagccaattcatcgaacgcctcagctgggacaaggtcgcgcggcacattgcggctggtcgaccggcgatcctgccgatcggtgccgccgccaagcagcacggttttcatctgccgctcaacaccgatcgggtgcaggccgagtggttcgcggcgcaactggccgaacgcatcgatgcgctgatctggcctaccgtcacctacggctactaccccgctttcgtcgaatatgccggcagcgccagcctgtcggcctcgacattcgaagccgtggtgcacgagatcgctgcaggcatcctcgacggcggtatcggcacattgttcgtgctcgacaccggaatcagcacactggctccggtcgaacgcgcgctggcgcgcttcgacccggccagggtgacgcatctgcggctctaccagggcccgcgcttcagccgcgtcgccgggcagatcgccgagcaacgccatggcagccatgccgacgaattggagacgtccctgatgctcgcgctggcgccggacctggtcgagccggaacgcgccgaagccagcccggtgctgcggcaggaggtgcccggccgcctgacgccatcggacggcaattcgccgaattacagccggtccggcagctacggcgatccgacgctcgcgacaccagccaagggcgcggcgctgctcgcggccattctcgacgatctcgacgagcaggtgtccgtggcgcttggcaagaacgccatgcgaccgcagcccggcacgtcgcgatgaacggcatctcgacatatcgcgtgatcgccggggcgatgcttatcgctgcgatcctcatcggcatcgcgtcctgtcatatcaaggcacagtccgagttcatgcgcggcgagggcatgccttacgacgccttcgaccggctgccgaagaccgatctcgatgtgcccggcggcaccatccacgtcgcctttgcgcccggcgatatggcgctgccgaaggacaggatattcgactgggtcagggcgtccgcccgcgcggtctcgatctattacggccggtttcccgtcagctcgttgcgactgctgatcgtgccggtcgacggttcgcgggttcgcggcggcaccacgtggggctatcgcggcgccgcgatccgcttgccgatcggccgcgacgccggcgccgacgacctcaagcgcgactgggtgatcgtgcacgagatggtgcacaccgcgctgcccgacctcgacgaccgctatgcctggctctcggaggggctcgcggtctatgtcgaaccggtcgcccgcgtgcaggccggcgacctcaccgcgcaggagatctggcaggcaatgatgcgcgacatgcccaagggcctgccgcaggccggtgaccagggcctcgacaataccgacacctggggccgcaaatactggggcggcgcgatgttctgcctgttcgccgacgtcgagatccgcaaacgcaccggcaacaaattcgggctgcaggatgccatgcgcggcgtgctcgccgccggcggcaatcacgaaaaggactggccgatcgggcgggtgctcgcgaccgccgacaaggccgtcggcgtcgacgtgctggaacggctgcacagcgcatggggatcaaagccggtgacacccgacctcgccgccctgtggcgcgatctcggcgtcacgctgcagggcaacggcgtcacattcgacgacggcgcgccgctggcggcgatccgaaaggcaattacagaagcgcgtccgcactagccgctgttcgtcgcggcagcacacggcccaactccgctggcttttggcagcgcgatggcggactatcgcgaatcgccgcagcccgcgtgggagaccgatgcccgaagctgatccgacatccgcccattggccgatcttccgttcgctcagggcgttcaaaccgagcgacctgcccggcgacctgatcgccgggctgacgctggccgcgatcgcgatcccggaacagatggcgactgcgcggctcggcgggttctcgccgcagatcggcttcttcgccttcatggcgggctcgctcggctttgcgatgttcggcgccaaccgcttcctgtcctgcggcgcagactccacgatcacgccgatcttcgccggcggactggcgctgatggcgacagcaggttcgcccgactatcaggcgttcgcgacggcgctggcgctgctggtcggcgtgatcatgatcgccggcagcctgttcaagctcggctggattgccaatctgctctcgacgccggtgatggtcggcttcctcgccggcatatccgtccacatcctggtctcgcaactgcccggcgtgctcggcctgaccacgccggacgggccgacgctctacaagctcggagtgctcgccgggaagatcgaccagaccaatgtctacacgctggcgatcgggctcggcgtgctagcgctggtcgccggatcggagaagatcagcgcgcggattccgggtgcgctgatcgggcttgtcgtcgccaccatcgctgtcgtcgccggccatctcgaaagcaagggcgtcaaggtggtcggcaccgtgccgggcacgctgcccaagccgtcatttccggacatcgcaccggagcgatggatcaagctgctgtcgctcgcgatcctgatcgccgtcgtcgtgatggtgcagactgcggcgacgacgcgctcgtttctatccgatccggacaagccggccgacgtcgatcgcgacttcctcggcgccggtgccggcagtgttctggctggactgttcggcgcgtttccggtcaatgccagtccgccgcggaccggcatcgtgtccgaaaccggcggtcgcacgcagctgtcagggctgtttgccgcggccatcgtgctcgcactgctcgccttcggggcaacgctgctgcagcacgtgccggacgccgcgctcggcggcgtgctgctgttcgtggcgctgcgcatcatccgcgtggcgcagatcgtcttgatcttcagccagtcgttctacgaattcctgctggtggtggcgacggccgccgcgatcatcgtgctgccgatcgagcaaggcgtcgcagtcggcatcgcgctatcgctgttgcacggcatctggaccacgacgcagggccggctggtggaattcgtccacgtccccggcaccacgatctggtggccgacgggcccgcacacgtcaggcgagcgcaaggcaggcatcgcggtcgtcggcctgcaggcaccgctgtcgttcctcaacgctgaaggcttctacagcggcgtgctcaagaccatcggcgcggcggcacaaaagccgcggctgctggtgatcgaggccagcggcatggtcgagatcgacttcaccgcggcgcaggcgctgcgcgatctgtttcgcgaatgccgtgatgacggtgtgacggtggccgtggcacggctggaatccacccgggcgcaggacgcgttcgagcgcttcgatctctatgaggtgctgcaacgggaccacgtcttccacagcgtcgacgaggcggtgcgtgcgctgggcgggcagacgtagatttgatgacgtcgtagcccgaattgagctccgcaccgtccgggcttcaggccgctgatttcggaatattggaaaagtatccgtgagttgcccgacgtgtcaagtggcttgatcgaacgtcgtttggtcgaacgccggccgccgccgactgctttgcatggggttgttttcgatatttcgacaaggccccccgggagaggcgcgccggacgtgctgcaagaccgatcgagcccgatttccgctcgggtcgagcgactcaagcctgctcactctgcagcgtcggatgctccttcagcagctccgccttgatcgagcccgcgtggatggcacggaacagcgctcgtcccgtcttgatgttgttggccttcatgcacagaccaacgatctcgcgcaccgcggagtcccgcaccagttcgtcggagatcttcatcgcggtctccatcgcgaccttggcggcgcgctcatagcgatcgcgctcgatctgccgctgctttggtgaacgcttgccgggcgagccgatcgcctcggcgcagccggccgcatgtggcagatcgcacggatccgctgcgcagcctcaatgtcgccgagcggctgggcgacgggatcgtcccagatatccgtgcgcttgaccttgttgaacaaccacattgccgtgcctcgaaagcgcggcaagcataactggccctggtgcaacctgtgaatggcggagtctgcgcgatgccgagcaagcggcgagctatggcgctagagccacaccgcgccgcccgctccgcgaaatagacgtgcgaagcaagaagccaagtttacactgcgtcacacgcggggcaaaaaagttccgcacacggacgctgacgaatcctctgcggcgtgacgacgcctcacgccgcaggaacgatctttccgggattgaaaatgttttgcggatcgagcgcgagcttcagcgcccgcatcgcatcgagcgcctcgggaccgagctcggccttcagatatttctgcttgccctgcccgatgccgtgctcgccggtgcaggtgccgcccatcgcctgcgcacgttcgaccagccgatgcatgaactcctcaccgcgcgccatctcgcccgtgtcgttgacgtcgcagagcatcgagcagtggaaattgccgtcgccgacatggccgacgatcggcgacagcagattgagccgcttcaaatcctcttcggtctcggtgacgcaatcggccagccgcgagatcggcacgcagacgtcggtggcgacgacgccgatgctgtcgccggggcgcagcgccttgacggaccagtaggcgtcatgccgggcctgccacagtctggtgcggtcctccggcttggtggtccaggtgaagtcgccaccaccgcattccgcggcgatgtcgcggaaattcttcgactgctcggcaacctcgacctcgctgccgtggaattcgagcagcagcagcggcgtctcgggcagcgacagcttcgagtagctgttgcaggccttcacctgcgcggcgttgagcaactcgatccgggcgaccgggatgccggtctggatcgcgaggatcgtggcctggcaggcgccgcgtacggtctcgaacgaacacgcggcggccgcgatcgtgtcgggaatgccgcgcaggcggatggtcagttccgagatgatgccgagcgtgccctcggcgccgacgaacagatgcgtgagatcatagccggccgacgacttcttggcgcgggtgccggtcgtgatgatctcgccgtcgccgcgcaccaccttcagcgccagcacgttctcgcgcatggtgccgtagcgcaccgcgttggtgccggaggcacgggtcgaggtcatgccgccgagcgaggcatcggcgccgggatcgatcgggaagaacaggccctggtcgcgcagatgctcgttcagcgccttccgcgtcacgccgggctggatcacgcagtcgaggtcctcggcatgcacctcgagcaccttgttcatgtcgcgcagatcgatgcagacgccgcccgccggcgcgttgacctggccttcgagcgaggttccggtgccgaacgcgatcaccggcacgcgattggcggcgcagatccgcaccacgtcctggatgtcggcggtttcctgcgccatcacgaccgcgtccggcggctggttcggcagccacgtggtggtatgggcgtgctgctcgcgcaccgcctgcgacgtgacgagccggttgccgaaccgcgccgccagcgcatcgatcgcgcgcttcagggcctcaggttcaggtcgcgtcacattgctcgaaatcgttgtcgccacgtcaaatttcctcccggctttagccgaccgtggcaaagcttgtataaggggtcaagagagcctgacttgaaaaagtggccgccggagtcacagaaaagctcatgctcgcaaggcaacgaaccggggatggaagatgacgtcagagactgccacgagcgagatgccgcttccaccagccccgttcagatcgtccgtgatgcagatcgagccgcaatggatcgactataacggccatctcaacatggcctattacaatgtgatgttcgaccgcgccatcgacgagatgtggctgcaactcggcatcgggccggtctacatgaaggcacggcactgctcgaccttcaccgccgaatgccacgtgcgctacttgcgggaaatccatctcggcgatcccgtgcaggtttcggtcttcctgctcggcgccgacgaaaaacggctgcacacattcgaggagctgcgccatgccaccgagggctggctgtcggcgacctcggaaaacctcacgctgcacatcgacatggaggcgcgcaaggtagcggcatttccgcctgacatccgcgcccgcgtcaaggcgatcgtggacagctatgccggcgtgccgcaccccgagggcatcggccgcaacgtggcgatgccctcgagaaaatagccagccttggctacactcgcgtgcggccgcgcgccaatccgaccaccgccgacaccaggaaaaggatgatggcgatgaagaagatcgccttggcgatttcgatcgaggcgccggcgatgccgccgaagcccaagatgcccgcgatcagggcgatgaccaggaatgtgacgacccagctcagcatgatcaaacctctgcttggtttcctcgcgccgcctttcgcccggcgccatagcttgaggaaacaaatcggcagcggaacgctggttcctgagggtgaaaccgcgaaattttcgccgatttcaggaaccaagctcacactggactgctgccaaaaccgtgactgccgtcggggataaaacctgtcaaaacggccgatcaggccctatatggccttcaatccctgctaagaaagctccccttcaccgtcccacggtgccatcgtggggccgagacgattcgccaatgaccgagccgagcaaattgccccatcacggcgttcccgagcaccagcctgcggctggcggcatcgccgcgcgtgcgcgggcggccgccggtccgcaatatctcaacggcctcaaccccgagcagcgcgaggcggtcgagacgctcgacggtcccgtattggtgctcgccggcgccggcaccggcaagacgcgcgtgttgaccacgcgcatcgcgcatatcctgagccagggccgcgcgcgcccgcaggaaatcctgtcggtcaccttcaccaacaaggcggcgcgcgagatgaagctgcggctcggccagatgctcggccaggcggtcgagggcatgccgtggctcggcaccttccactcgatcggcggccgcatcctgcgcatccatgccgagctggtgcagctcaaatccaatttcaccgtgctcgacgtcgacgaccaggtgcggctcttgaagcaattgctgcaggccgagaacatcgacgacaagcgctggccggcgcggatgctggccgggctgatcgacagctggaagaatcgcgggttgtcgccgtcgcaggtgccggcgggcgaggccgcctcgttcggcaacggcaagggcggcaagatctacgcgacctatcaggagcggctgaagatcctcaacgccgccgatttcggcgacctgctgctcgagaacatccggctgttccgcgagaaccccgacgtgctgcgacagtaccagaaccgcttcaagttcatcctggtcgacgaatatcaggacaccaacgtcgcgcaatatctgtggctgcggctgctgtcgcaggcgcctgcgcggcagggtcttccgatctcggcaatcattcccggcgcgaccgatgctgaaccggcgaaggaagacgccaccgcgcaaccggcgccggctccgccgtccgcaccgccgcgcaacatctgctgcgtcggcgacgacgatcagtcgatctatggctggcgcggcgccgaggtcgacaacatcctgcgcttcgagcacgatttccccggcgccaaggtgatccggctcgagcgcaactaccgctcgaccggccacatcctcgccgcggcctcgcatctgatcgcgcacaatgaaggccggctcggcaagacgctgcgcaccgaggacgtcgacggcgagaaggtcaccgtcaccggctcctgggattcggaagaggaagcgcgggcgatcggcgaggagctcgaggagctgcagcgcgccggcgagaacctcaacgacgttgccatcctggtccgcgcctcgttccagatgcgcgagttcgaggaccgcttcgtcacgctcggcctgccctaccgcgtgatcggcggccccagattctatgagcgcgccgaaatccgcgacgcgctggcgtatttgcgcaccatcaattcgccggccgacgatctcgcctttgagcgcatcgtcaacgtgccgaagcgcggcctcggcgacgccaccgtgcagctgctgcatgaccatgcccgcaagcgccggattccgctgttcgaggcggcgcgcgccgtggtcgagaccgacgagctgaagccgaaggcgcggggctcgctgcgcggcctcgtcatgcagttcgaccgctggcgcgcccagcgcgaggtcacctcgcacaccgagctcgccgagatcgtgctcgacgagagcggctacaccgagatgtggcagaaggaccgctcggcggacgccgcgggccggctcgacaacctcaaggaactggtgcgctcgatggaggaattcgagaacctgcaagggtttctcgaacatatctcgctggtgatggaccgcgacggcgaggccggcgacgaggcggtgtcgctgatgacgctgcattcggccaagggcctcgaattcgacaacgtgttcctgccgggctgggaggagggcctgttcccgagtcagcgcacgctggacgaacagggccgcgccgggctcgaggaagagcgccgcctcgcccatgtcgggctgacccgcgcccgccgccgcgcaaaaatctatttcgccaccaaccgccgcatccatggcacctggtcgaccacgatcccttcccgcttcctcgacgagctgccggcgcacaatgtcgagatcaccgaatccaagggtggatcgggctggggcggcagcggtggctacggcgcctcgcgcttcgacaacctcgaatcattcggctcgagctattccaccccgggctggcagcgcgcccaggccaaccgcggccgcggtggcgggggccgtggcggcggcttcgaggagcggcaatcatctttttcgtctgatagcttcagccgcaccaagcgcggcccaatggtgatcgagggcgagctggtggcgaagtccaccggcacgacgtcggaattttcgctggacgatcgggtgtttcaccagaaattcggctacggccatgtggtgaagatcgacggcaacaagctgaccatcgccttcgaaaaggccggcgagaagaaggtggtcgacagctttgtggagcgggcgtgacagaacggccttctctgttcgtagcccttgaccccagttgaattcacgggttgagatggccccatggtccggggtgggtttttcctttttgtcgtcgcgctcactgcgccgtcgctggcggtcgcggagacgctcagctttggcgattcggcagccgcactcgccaaggcctgcggcgcagacatcaccgccaactgccgcggcgtcaacctcgactccaaccgccttaaggaatgcctgtcgcgcaaccgcgacgtgatctcgccgacctgcaaggagagctacttctccaccctcgatgcgatccagaagcggatcgcggcgcgcgtgacggttgccaatgcctgcacccgcgagatcgtcaaggtgtgcggcggctcgaccaaggagaccagcaaatcggtgccctgcctggtcgccgccaagggcctcagccgcaattgcgcccaggcgatcaatgacgcggggtatcagtgatgcgccgaggcctgcgcgatctcggcctgctcggcacgctggtcttgctggcgatgccgctcgcgcatgcgcagaccgcgatcacgcgcgatgacgtcatcgccaagctggatcatttcgagacggctgccgagatcgacgttcccgcgctgcgccagcaggtgctcgaacgatcacgctcgcgttcgaagaacgagccgccgccgtcgaagcggccaccgatcgcccccgacctgaacaacctgccggcattcaatgccgacatccagttcgacgtcgacacgccgatcgtgctgccgaattcctatcagaccgtcgggcgtatcgccgatgcgctgacgcacgcctcgctattgccgtacaccttcctgatcgtcggtcacatcgaatcgaccggccggcgcgagaacaacgtgatcctgagccagcggcgggccgacgcgatccgcgacattctggtcaacaccttcaagatcgcgcccaagcgcctgcaatcggtcgggcttggcgaagagcagttgctcgatcccacccgcatcaatgcgccagtcaacaaccaggtgcagatcatgctggtcgcgaaggtcgctgacgagcccgccgcgcacccagccccggcggcggcggccaagaagccgccgaaatcaatgaagaagcgttgaggcgacttttccgccacaccacagcacgaattttctgtccggccgggtgattgcagaacggattatacgtccctatctgcgcttgaccctcactccgccccgccggccccgatccgcgtcggccatccctccctcacgcctccgacgctttcatgtcgccgatcatctccgtttccaatctctcgaagacctacggctccggcttcaaggcgctgaagggcatcaatctcgatatcaaccgcggcgagatcttcgcgctgctcgggccgaacggcgccggcaagaccacgctgatcagcatcatctgcggcatcgccaatccgagccagggcacgatcaggatcggcggccacgacatcatcagggattatcgcgcggcaaggtcgatgatcgggctggttccacaggaactgcacaccgacgcgttcgaatcggtatgggcgaccgtcagcttcagccgcggcctgttcggcaagccgaagaaccccgctcatatcgagaaggtgctgcgcgacctgtcgctgtgggacaagaaggacaacaagatcatcacgctgtccggcggcatgaagcgccgcgtgatgatcgcgaaggcgctgtcgcacgagccgcagatcctgttcctcgacgagccgaccgcaggcgtcgacgtcgagttgcgcaagggcatgtgggaggtggtccgcacgctgcaggcgtccggcgtcaccatcatcctgaccacgcactacatcgaggaagccgaggagatggccgaccgcatcggcgtcatcaacaagggcgagatcatcctgatcgaggacaaggcgaccttgatgcagaagctcggcaagaaggagctgacgctgcaattgcagaacaagctcgacgccattccgccggcgctcgccgcctacaatctcgaactgtccgacgacggccacgcagtgacctacgactacgacaccaagggcgatcgcaccgggatcaccagcctgctcaacgatctccgcaacgccggcatccgcatctccgacctcgacaccaggcagagctccctcgaagacatcttcgtcagcatcgtgagggcgccatgaactatcgcgcgatccgggcgatctatctgttcgaaatggcgcgcacctggcgcacgctgctgcagagcatcgtctcgcccgtggtctcgacctcgctgtatttcgtggtgttcggcgctgcgatcggctcgcgcatcaccgaggtcgagggcgtcagctacggcaccttcatcgtgcccggcctcgtgatgctgtcggtgctgacacagagcatctccaacgcctcgttcggcatctacttcccgaaattcgccggcacaatctacgagatcctgtcggcgccgatctcgtatttcgagatcgtgatcggctatgtcggcgcggccgccaccaagtcgatcattctcggcctgatcatcctggcgaccgccggactgttcgtaccgctgcatatccagcatccggtctggatgctgacattcctggtgctgaccgcggtcaccttcagcctgttcggcttcatcatcggcatctgggccgacggcttcgagaagctgcagatgatcccgatgctggtggtgacgccgctgaccttcctcggcggcagcttctactcggtgaacatgctgccgtcgggctggcgcaccatcacgctgttcaacccggtggtctatctgatctccggcttccgctggagtttctacgagatcgccgatgtcagcgtcgggctgagcctcggcatgaccgcagcgttcctgatcgcctgcatggtgatcgtggcctggatcttcaggaccggatatcggctgaagaactgagacccgtagcccggatgaagcgcagcgcaatccgggacagcctcgcggtttggcaccagaggccccggatttcgcttgcgctccatccgggctacgcaccagctcaatagcaatggaaatggccgtggcggtaatagccgcggcagcgatggccgcggcggtagccgcgatccgggatgccgaacacgcccttgaccgcgcccatggcgccaccgacgccggcgccgacggcgccgccaaccacgccgcccaccggaccggcgacccggttgccctcgtaggcgccctcgtgggccccgcggacgatgccctgggcatggcccgcatgggggacagcggccagcgtcaaagcgaggccagcggctgcaagcaggagccgcgcggagaggcccgctgggtggacggccgcggtcttaactttgctgttgttcatctgggttccttaaagtgcgacgcgaatgcgtcgtcggggcgggattgtgaaacgcccatgcggccaaatggttgcgttcggcggttcatcggggctgtcgtcgcaccctgctcgcgaaaaagtcagcacgtcgtgacgggcccgcccggcttcggccttgtttgcgccgcgcgcgggattaacgatgcgcgaagtccgcgactggaaccaagttcggattccgtgcatattggttgccggggacggagagccgctgctgcgacaggcctggaggccaaggtaataaaatgcgttcgttcctcattgcgtttacgtccgtaatgctggtcaccgccggcgccgcgcaggccaaggtcgatatcaccattgacaaggacaaccagcagatgaccgtcgcggtcgatggcgtcgcgcgctatcactggccggtctcaagcggcataccctcgcgcgaaacgccgaacggcaccttccgcgccttccggatggaagaggatcactactccaaggaattcgacgacgcgccgatgccgcactcgatcttcttcaccaagatcggccacgcgattcacggcaccgattcagtgagccgtctcggcacgccggcctcgcacggctgcgtgcggctgtcgcgcgacaacgcctcgacgctctacgcgctggtccagaaagaaggtgtgctcaacaccacggtgacgctgaccggctcgtcccaggtcgcgctggcgcgcaatccgcgcgggcgcaacggcaccgcggtcgcccgccgcgcgccgcagcaagacgagcagtatggcactgccgccgccggcgaccccgtcgtcctgaccccgcagccgcgcgaatatccggcgcaggctcgcgtcgacgacggttacatctatccggccgacggcagctcgaccgcccagcgctacccggcgccgccgtcggcgcgccgtgcctacggcgcgcaggcctatggccagcagcaatactacggcaaccagggctacgcgccggcgccacaggtctactatcagccgcggccgaactatccgcggcagcgcgatttctacggcaacagctatcaggactgagaccggcccctgatccgtcggtggcgccgtcaccctgcgccgtcggttcccgaggccccctcacccgcttgtgaaggcctggaaaggcccgtgcggccgtgccccgtggcccgtcgtcgcgccgtcatctgattgtaagattagcccgatattcggcggcaatcgtcgcccgcctggcctcggaaggccgattcacgcggaatgcccgctgaaatcagagcgagaggcgcgcgtcacgaaggcagtatcagaggtcggaaatgaaacggggcttcgttgtcctttgcctgtgcatcgtggcgatggccggctatttcacgacggacagatgggcgatccgtcacgcgacgctgacgttccacgacgtgctgcgcgacgaccgcaacgtcacggtcgaagtcgcggtccgtcgcgaccggcagatgcaggccatggccgagatgatcgagctgccggtcgcgatcctcagccacggcaacaccgtcaagaacaccgagtactcgttcctcaccaacgtgttcgcctcgcgcggctacctcgtggtcagcattcagcacgacctcgactccgacgccccgatggtgaccaaggtcggcgaggaatatgtcggccgtcgcatgcaatataatcgcggcgtcttcaacatcatgtatgcgatcgacgagctgaagaagctgtatccgaacgcaaactatcgcgcgctgacgctgatcggtcactcgaacggcggcgacatctcgatgttcttcgccaagcagcatcccgacctggtcaagaaggtcgtgacgctggacaatctgcgcgttcccttcatcaccgacagcaagatcaagatcctgtcgttccgttccagggatccggtgttcaaggccgatccgggcgtcgtacctgacgacgagacctgcgccaggctcggcatcaaggtggtccggacccaattccaccacaacgacctcagcgaccgcggccccgacagcgcaaagtcgtcgatccaggccggcgtcgagcaattcctcgacgaggatgccggcgagaccacgccgacgatgccgctgctcgccgcttcgacgcccgcctccgcggcgacggcaccggaaagaaaatagcgatcgcgctgacgtcgacgtgcgctcgccggtgatgccgggcaacgcctacgcacgcgcgctgcgttgcgccctggcaacgagccagatcgccgaaagcaggaaatagaacgccccgaagcccgcatagggagcgacgtcgagaatcgtcggcgctacggtgccgatcgatcggctgatcatgtagccgccggcaagcgccgactgcgcgccgctcaggatcatcgcccattgcgcgccaacctgacgccagcgcctgacgccggtggcgagttgcagcacacccgcgaggatcgcccaaaccccgaacaccgccagaacggcataggtgtcgcggccgatcgccgcaatcacggcgagcgccgtgattgcactgaccgcgacattcaacgcttgagatgggttggcgatcaacccgccgttgacccgcgcatcagccagattggcggttgcgtcccatgccgggtagatcacgagcaggaacgcggcgatgccggcgtgccggctgaacagaaccgcggcggcaacccaggcgatcgagaagatcgcgcgcccaaagcgcgatgacgattcgacccaatctcatcgcgctttagcgcctactgctcgccgtcgcgcaggcgccggtagactgcgcccagcacgttcgaatagtcgtcggtccagacccgctgcttctcgttggcatcggtctcggtccagacatctgacgaggcgagcctgccgacgtccgcttcatcgcgcgccgagaccacgaccgaggtcgagaagatgtactcgttgtcgcggccggaatcctcgctgtagacccagctcttcatgtcgttggcatcggcgatgccgaccacgacactggccaattcgagatggcggttcgagacgtgcatcacgaccgcgccctgcggcgccagcttctccttgtagatcgccatcgcctcttctgtcgcgagatggatcgggatcgcgtccgacgaataggcgtcgacgatgatgagatcgtagacgccgtccggctccttggcgaaggtcagccgcgcgtcgccgatcaccggcttcaggttcggctcgcaattctggatgtaggtgaagtatttcgggtcgcgcgcggtatcgaccatcgactggtcgatctcgaagaatttccagtcctcgcccggctgcgaggcgcaggtcagcgtgcccgagccgagcccgattaccgcgactttcagcggcgcacccttgcgctcgcggatcgccgtgatcgcccgcccgatgccgccgtccttgtggtagtagctgatcggttcgggccgcccggtcaccggcgtgccgtcgtcgttcttgaacttctcggcgccgtggatcgtggtgccgtgcatcagcacgtgatactgcccgttcggcgtcaccacgatcttgtgcacgccgaagaagctgcgcacggtctcgacgcggccgtcgtcggacggataggcgcgcagcaccaccagcgcgaccacgacggttgcgaatatcttccggcgatttgcgttcagcgcaagcgcgagcagcgccgagagcacgccgaccgcgccgatcacccacacccggtggtcgtcgaaccagttgaagatgtcgccggccgaatagctcggcgcgatcagcgcgaccgccagcaccgcgaggaacggccagtaccaggcgctccagcgcggcagccgctccgcgcccccgggcggacggcacagcgccgccagcgccagcaggatcggatattcagcgatccatgagaaggtgaacggcgcgatcagccccgcgaacaggccgccgaccatgccgccgaacgacagcgcgacgtagaagccggtgaggtatttcgcggcgggacgggtgcgcgcgagctcgccatgacaggccatcgcgatgatgaagaagcagagctgatggccgccgagcgtcagcagcagattctgctcgccaccgaccgcgagcaggatcacgacgccggcgatcgccagcggctgtgccaacagcatccatttgtgcggcagcagcggccgcgactggaacaccagcacccaggtcaaaagatataacgacagcggcaacacccagagcaatggcgccgccgcgacgtcggtcgagatatgcgccgtcactgcgatcaggaggcccgatggcaccgcggcaaggaagatccagcgcgcccgcaggccccaggacggtgccggcgcatcggcgtcatcaacctgcatgttgagcacgcctgcattggccggcgaccgcaacaacagcacgccgcaacctgcgatcaaaagaatcagcaggccatagccgccggtccagatcaggttctgggtgcgcaacgtgaacatcggctcgagcagcaccggataggacaacagcgccaggaagctgccgatgttcgaggacgcatagaggaagtacgggtcgggcccgctggggtggccggtgcgcacgaaccaggcctgcagcagtggattgttggcggcaagcgcgaagaacggcaggccgatcgagaccgcgaacaggccgagcagccacaccgcatagcccgaggtcggcggctcgccccagccgctcctgatcgagagcggcaaggtcagcagcgcgacgacgagcagcaccagatgcaccgcgatcggcacgacacggcgcttcagcttcatcaacagatgcgcataggcgtagcctgcgagcagcagcgactggaagaacaccatcgccaccgaccacaccgccggcgagccgccgagccgcggcagcaccatcttggtgaacagcggctgcaccgagaacagcaatagcgcgctgacgaagatcgcggcggtgtagacaaccagcaccagccggtttcgcgaggcggacggctcagacgtcatgaaggctccggcatggacccggcgggcgccggaggcggacggcccggcgccaccgcaccggggatttgaattgagcataaggcagtatcacggacaagaaaccgcggtcacgtggacttgacgacgcggcgctgcagcgccacagcacattggatctttcgggtttgagggcgctatcgtttcgataatccggtttccgcttttgcggatcatgctctaatcactgcttgttgaagcggacatgaacaaaacagacgtcgtcatcatcggtgcggggcataacggcctcacctgcgcggcctatctcgcgatggcagggctgcgggtgaaggtcgtcgagcgccgcaaggtggtcggcggcgccgccgtcaccgaagagttttgcccgggcttccgcaattcggtcgccgcctacacggtgagcctgctcaacccgcaaatcatttccgacctgaaacttgccgatcacggtttgcggatcgtcgagcgccgcgcgcagaacttcctccccgcgcccgacggcagccatctgctgaccggcgaaggccgcacccagcagtcggtcgcgaaactgagtccgcacgatgccgccgccatcggcgcgttctcgggggaactcgaagccatcgccgacgtgctgcggcagttcgtgctgcgcgcgccgccgaacctcgtcgagggctttggcatcggcgcaatcagcgaagtcttcaacgcgctcggcaccgccaacatcctgcggcggctgtcgctggagcagcagcgcaatctgctcgacctgttcacgcgctcggccggcgagatgctcgacgagcgtttcgataacgacctcgtcaaggcgctgttcggcttcgatgccattgtcggcaactatgcgagcccctacgccgccggctcggcctatgtgatgctgcatcatgcgttcggcgaggtgaacggcaagaagggggtctggggccacgcgatcggcggcatgggcgcgatcacccaggcgatggcacgtgccgcgcgcagccacggcgtcgagatcgaaaccgatgcccccgtccgcgaggtgatcgtcgaaaatgatcgcgccacgggcgttatcctcgacagcggcgagacggttcgcgccaaatatgtcgtctccaacgtcaacccgaaactgctctacacgcgcctggtgccggagggcgcattggcgggcgaattccgcacccgcatctcgcgatggcagaacgggtccggcacgttcaggatgaacgtggcgctgagcgccctgccctcgttcaccgcgctcccaggccccggcgatcacctcaccgcggggatcatcatcgcgcccagcctcggctacatggatcgcgcctggcgcgatgcgcgcgaattcggctggagccgcgcgccggtcgtcgagctgctgatcccatcgacgctcgacgacagcctgagcccgccgggccagcatgtcgcgagcctgttctgccagcacgtcgcgccgcaactgcccggcggcaaatcatgggacgaccatcgagacgaggccgccgatctgatgatcgcaaccgtcgaccgctacgcgcccggcttcgcgggctccgtgatcggccgccagatcctgtcgccgctcgatctcgaacggcagttcggccttctcggcggcgacatctttcacggcgcgctgacgctgaaccagttgttctcggcgcggcccatgctcggccatgccgactaccgcgggccgctccgcggcctctaccattgcggttccggcgcccatccgggcggcggggtcaccggcgcgcccggccacaacgccgcgcgggccatcctggccgaccatcgcgcgctgttcgcctgacgcggaccgcgccgtcagactgtggacatatctgtcgagaagctgtggatcgaccgtggtcagatctggtgtcccatggcggcaaagccggtggacatcccggtggacagcctgtggaacagaggccgataaccgcgggacgacgcgcttgatgacttgtcgataagctgcgcaaaacccggtggacaacctgttaaagaaaaacaccgggcgtcactgcccggtgcttgcttgagaacgccgcctgcgaattactcgagcgaacctgcgatcgtgctggacgttccgctcaaattcgtgccgatgccattcaccgcagcgatgatggcgagggcgatgccggtcgcgatcagcccgtattcgatggcggttgcgccggagtcgtcgtccaaatgcctaacaagaatagccctcattgcagccctgcgcttggttgtgatgccctgggacgagggatactgcggtacctaaggttgtttgaatcgggaccctatcagttctcgcgaaactcgattgaaatccggttgaacttttagcaaaaatcgcgctaacggcctgcaatgaccccatccacacaccgcgccagcgtcaccctgtcagacgagacgaccgcaaagcgcgtcgtcgatgcgctttccgagctcttcttcgaggatcaggcggcatttgcggccttcgagcggccggatggccgctgggacgtcacggtccattttgctgaaccgcccgaccaggccttgctgcgcgagttggtcggccaggtcgtgcggccggacatcgcatcgactttggtctttgacaccatcgaggcaaaggactgggtcaaggccagcttggaggacctggtcccggtcgcggccggccgttttgtcgtccacggtcagcatgaccggcacaggatcccccccaacaagctcgggatcgagatcgaggcggcgctggccttcggcaccggtcatcacggcaccacgcgcggctgcctgctgctgctcgaccacgtgctgaaggcctatcagccgcgccgggtgctcgatctcggcaccggcaccggcgtgctcgggattgccgccgccaaggcgctgcacggcaaggtgctggcgagcgacatcgacccgccgtcggtcaaggtcgccgaggagaacgcctggctgaacggcgcagggcatctggtggacgtgatccgtgccaccggctttgccgcaccgcgctttgccgcggacgggccgttcgatctggtgctcgccaacatcctcgccaacccgctgcgccagctggcgggaccgatggcgcagcacctcgcgtcgtcggcgcaggtcattctatcgggcctgctgacccaccaggcgccggcggtgatcgccgcctaccgcgcccgcgggctggtgccgctgcggcatctgaagatcgagggctggagcagcctgctgttacgcagggtcaaatgaccgcccccggcagacagtgcggcgactgcacgctctgctgcaaggtgatggcgatcgaagagctggcgaagccggccagcgcatggtgtccgcattgcgagccggggcgcggctgccggatctatccggaccggccggtggaatgccgctcgttcagttgcgtctggctggtcaacgaactgctggaggagcactggaagccctcgagatcgaaacttgtgctcaccacctccgaagacggtctcgaggtccggtgcgatccgggattcccggacgcctggcgcagggagccgtttcggagcgagttgagagaatgggcggtctcaggcgagacgctcgacatgaccgtcgtcgtcatcgtcggccagcgcatgacgctgctgacgccggagtgcgaattcgatctcggtatcgtcggccccgatgagcggatcgtgcgcgagctcgatggcaccaaggtggtcaacgcgaccgtggccaaggcctcggacctcgatcaataaacgcgttctgcaggctggctacttcggcgtgactgaatcgcggctggtcgtcccgaccttgtcccgagcggccgcgcgccgcgcacgcgcctcgacaaaacggtcgagcatctggacgatgacgccacgttgcttctgctcgatcggtgcgatcgggccgcggcggaccggcggcgaaatcttctcaaacgtgaatgcaggcatcgtgcatctcctcaccgttgagttgagacactcctggacactccccgtacgcttgaccggcgacggtggacatcgtccggtcacttccactatgccatgattcaagcataagtaatgctgaaaatgtggtcatgccccagcgcgtcggcgcgaagatcatgctgcatccggagagagtgcaaaggcgatgttcgaagcccatttccagactttcgaagaacccgaaggcggcgttgcgctggccgcacggctaagcgcgctgcgtgaggaactggcgcggcacaagctgaccggattcgtggttccacgcgccgaccagcagcagaacgagtacgtcgcagcgtcggaggaacggctcgcctggctgaccggcttcaccggatcggccgggctcgcgatcgtgctggccaaggaagccgccctgttcgtcgacggccgctacacgctgcaggccggcaagcaagtcgacgccaaggcctggcaggtcgagccgctggtcgagccgccgccggagcactggctgacgaggcatctatcggccggcgaccgcctaggatttgacccgtggctgcacacttctgcggcagttgaacggctgacggcggcctgcaccaaggccggtgccgagctggtcgccgtcgacggcaacccggtcgatacgatctggcacgagcggccggcaccgccgctcggcccggtttcgatccacggcgcgcaattctccggcgagatcgaggccgagaagctgaagcgcatccggctcgagatcaacaagctcggcgtcgatgcgctggtgctctccgacagccacgcggtggcctggaccttcaacatccgtggcgccgacgtctcccatacgccgctgccgctgtcctacgcgctggtgccgaaggaaggccggccgctggtgttcatcgatcaccgcaagctgtccaactctgcgcgcgaccatctcgagcaatccgccgatgtcgaggaaccggcggcgctgaccgcgaagctcagcgagcttgccaagcgcggcgcctcgatcgcgctcgacggcgcgaccgcggcggacgccctgagccgcctgatcgcgggcgccggcggcaagccggtgcgcggcaacgatccggtcagcctgctcaaggcggtcaagaacctcaccgagatcgaaggcacccgcaccgcgcaccagcgcgacgccgtggcgctgacgcgcttccttgcctggatcgaccgcgaggcgcccgcaggccacctcaccgagatcgacaccgtcgaggccttggagacgttccgccgccagaccggcgcgctgaaggacgtctcgttcccgaccatcgccggcaccgggccgaacggcgccatcgtgcattatcgcgtgacgcgcaagaccaaccgccgcatcgtgcccggcgatctcctgctgatcgattccggcgcgcaatatcaggacggcaccaccgacgtcacccgcaccatcgcgatcggcagcccgaccgcagagatgcgcgatcgcttcacccgcgtgctgcgcggccatatcgcgatcgctcgcgcgatcttccccgacggcaccaccggcgcgcagctggacagcttcgcgcggcaatatctctggcaggccgggatcgatttcgagcacggcaccggccacggcgtcggcagctatctcagcgtccatgaagggccggcgcgaatctccaagctcggcaccacgccgctgaagcgcggcatgatcctgtccaacgagcccggctactacaagaccgacgcctacggcatccggatcgagaacctcgaactcgtgatcggcaccgacattgccggcgccgagaagccggtcaacgccttcgagacgctgaccttggcgccgatcgatcgccgcctgatcgaggtgagcatgctgagcgaaggcgagttgaactggctcaacgattaccatgcccgcgtcgcacgcacggtgcgcccgcatctcgacgacaacgccaccaagctgtggctcgacgaggctacggcgccgctgaggtagctggcacgcgagcatccacatgttcgacgtcgtcccggcgaaggccgggacccatagccacagctatctgccgttgcatgacgctggggccacagcgcgcttcagcaatgcacgcctgtggttatgggtcccggccttcgcggggacgacggtgtgcttgttgcgcgggacgaaacatcgccgcggcgtcacccgaaatgcatgggcgtatgccgaaacacccgtattccgcgcgaacggccacgctacagtcgttccacaatgcggaaacggacctgaatgcacggcgtgatgggcaagccgcgcggcgcggcgcaagacaacatcaaagacaacaacatcgcgacctcgaaggtcatgctgctgatgctcgtcgtgatgacgggcgtcgcgccgatctcgctctatatgctggtgccggcgctgccggtgctggcgaccgatttcggccgcgacatttccatcgcgcagatgaccgtgtcgctctacatggtcggcatcgcgctgtcgcagctgatcatggggccgctgtccgacaagttcggccgccggccggtgctgctcgcgggcctcggcctgatggtcgtggccggcatcggctcgctgttcgccgaaaccctgccgcaactgatcgcggcgcgcttcttccaggcgctcggcggcgccagcggcatggtgatcagtcgcgccatcatccgcgatctctatccgcgcgagcgggtcggcgccatgatcagcctcgtggtcgccgcgctgatgatcgcgcagatggtgagcccgctgaccggcggtctgctggagaccgctttcggctggcgcgcgatcctctatctcatcaccgcggcgtcgctgaccgtgaccatcttcatcgcgctggcactgcccgaaacccgccgcgaccgcgccgacagctcgagcttccgcaacgacctcggcaagctgatccgaagccgcgcgttcgtcggctatctcctgtgccaggtgctggcgtcgcagatcatcttcgccttcgccggcggcggcccctacatcgtggtcacccagatgggccgcagcagcgccgagtatggcgcatggttcgcgatgaccgggttcggctacttcgtcggcaatctcttgtgcgtgcgcttcgcgccgcggcactcattggagaggctgatctggttcggcctcgcgctgcagctcggcggcagcctgttgaacctgatctggagtttcactggggtaaaccaggcgccgctctggctgttcggcacccagatgatcgtgatgatcgccaatgccttcgtgatggccaattcggccgccggcgccatcagcatccggcccgaagccgccggcaccgcctccggcgccatgggcttcctgcaacagggcatcggctcgctgatctcgcaattcggcgcctatctcggcggccattcgaccaccacattgccgttgacatcggcgctctttgcgatctcgatcgcctgcgcctgcaccatgatcttcgtggtgccgcggcgcaacgtggtggtgagcgaggagttgatcgcgcaggccgaggaagatgagcaggggatgatgtgactggcgcaatcgcgccacgccctccctcgtcatccccccgcgacagcggcaagtgcggcagagccgcgccttactcctcgatcagcttcagccactcgtcttcggtcagcaccgcaacgccgagctcgcgcgccttggtcaacttcgacccggcttcctcgccggcgacgacgtagtcggtctttttcgacaccgagccggcaaccttggcgccgagacgctcggccatcgccttggcttcgtcacgggtgaatttggtcagcgacccggtgaacaccacggtcttgtccgagaccggcgagctcttgcgcggctgctcggcaggcttcacctcgatctggcgcagcaattcgccgagcgccttgacgttgcgcggctcggcaaagaactcgaccactgcgtccgcaacgatctcgccgatgccgtcgatgtcgttgaggtcctggtaggcttcggtggtgttctcttcgtcctggctgcccttggctgcggccagcatcgcctcacggaaattctcgatcgtgtggtagtgccgcgccagcagcttggcgttgccctcgccgacatggcgaatgccgagcgcaaagatcaagcggtgcagctcgatattgcggcgcgcgtcgatcgcgtcgaacaggttgcgcaccgaggtctcgccgtagccttcgcgctccatcaatttcgaggtcgaacgcgcgtcccgctcgcgaagggtgaagatgtcgaccggcgacttcaccagcccatcctcgtagaattcctggatctgcttctcgccgagaccatcgatatcgaaggcgagacgcgacacgaaatgcttcagccgctcgaccgcctgcgccggacagatcagcgcgccggtgcagcgacgcaccgcctcgccttcctcgcggatcgcatggctgccgcataccgggcaggtgtcgggaaacttgtacggctttgcactcttcggccgcttgtccagaacgacgccgacgacctgcgggatgacgtcgccggcgcgctgcaccacgacggtgtcgtcgatacgcagatcgacgccgtcccggatcggatttccgtcgttgccgatccctttgatgtaatcttcgttatgcagcgtcgcattcgacaccacgacgccaccgaccgtgaccggctccagccgcgcgaccggcgtcatcgcgccggtgcgccccacctggatatcgatccccttgagaacagtcgttgcctgttcggcggcgaatttgtgtgcgatggcccagcgcgggctgcgcgacacgaagccgagccgctcctgccagtcgaggcggtcgaccttgtagacgacgccgtcgatgtcgtagccgagcgatgcccgctcctcgccgatcttgttgtagaatttcaagacatcgtcgacgctgtggcagagcgtgatcaatggattgaccacgaagcctgccttgtgcatccactccagcatgccgtgctgggtgtcggcaggcggctcgctcatctcgccccacgtataggcgaagaatttcagcggccgtgacgcggtgatcgagacatccttctggcgcagcgaacccgccgccgaattgcgcggattggcaaagatcgtgtcgtcggccgcagcctgcttcttgttcagctcgaggaagtccttcttgagcatgtagacttcgccgcgcatctcgcaggcggccgggaaattgcggcccttcaggctgtgcggaatgtccttgatggtccggacattggcagtgacatcctcgccagtgaagccgtcaccacgggtcgctgcgcggaccagctcgccgttttcatagcgcagcgagagcgacagaccgtcgatcttcggctcggcgaccagcgccggaatgtgatcggcatcgagcttgagaaagcgcctaatgcgctcgacgaactcggtgacatcttcgtcgctaaatgcgttgccgagcgacagcatcggaacgacgtgctgcaccttggcaaagccgcgggccggcgcagcaccgacagtttgcgtcggtgagtccgtggtgacgaggtcgggaaacttcgcctcgaccgcttccaagcggcgccgcagggcgtcgtaggccgcgtccgatacggtcggcgcgtccttctgatagtagcgctcgttgtgtccctcgatctcgagcgaaagccgcatgtgctcgaccttggcttgcgccttggtgagcttgtcgacgtcgaccagcgctttcttcgccttggtggccatcggcgaactagctcgccgcccggagcagccgttccgccgcggccctcgcctcggcggtgatctcggcgccggccagcatgcgcgcgatctcttcacggcgatggtcggcagcgagcgcgttgacgcgggtggctacgcgcttgcccttgtcgagcgcatccttggagatcaacagatgctggctggcgcgggccgcgacctgcggcgcatgggtcaccgccatcacctgtaccttgccggcgaggcgcgacagccgcgagccgatcgcgtccgccaccgcgccgccgacaccggtgtcgatttcgtcgaacaccaaagtcggcgccgagccgcgatcggccagcacgaccttcagcgccagcaggaagcgcgacagctcgccaccggaggcgaccttcatcatcggtcccggcttggtgcccggattggtctggacccagaactcgacgcggtcgatgccctcaggcccgggcgcggcggcattggcctcgacctgggtcatgaatttcgcgcgctcgagcttgagcggcgcgagctcggcattgaccgccttgttgagcttctcggccgccttgctgcgcgccgccgatagttttgcggccgcagcagcataacgcttgtcggcctcagtggcggccgcctccagctttttgagctgatcggcgccggcatcgatcagcgcgacgtcattggcgtattgcgccgccagcgcggccagcagatccaccggcgtcgagtatttgcgcgaggcggcgcgcagcgcgaacagccgctcctcgatccgctcgagctcggccggatcgaaatcagtcgccgccagcgcagcgtgcagatgctgatcggcttcctccagcgcattgatcgcgatgtcgattgctttcacggccggctcgatcagtccgggcgcattggcggcgcgccgctccagccggcgcaccgcggccgacagcgccgacaccggcgaatgcggtccgccgatagcctcctgcgcctcgcgcagatcggtcgcgaccttctcaccctgcatcatggtggtgcggcggttggcgagttcggtctcctcgccctccttcggcgccagcgtcttcaattcctgcgaggcatggcgcagatagtcggcctcacgcgcggcgcgctccatcccggcgcggtgctcatcgagcgcggcaccggcggtccgcctgatatcccatagcgcttccagcgtcacgacgtccttctcgtggccggcgaaggcgtcgagcagctggcggtgggtggaggcgtcgaccagcgcgcgctcatcgtgctggccgtggatttcgaccagaacggcgccgaccgccttcagggtctgcacgctgatcgcctgatcgttgatgaaggcgcgggtgcggccatcggcgagctgcacgcggcgcaggatcatctcaccggtgtcgtcgaggccgttctcggcgaggattttggccgccggatgccccttggggacatcgaacatcgcggtgacctgcccctgctcggcgccatggcgcaccaggccggcatcgccgcggccgccaagcgccaacgcaaaggcatcgagcaggatcgatttgccggcgccggtttcaccggtcagcaccgccaggccacgggaaaattcgatatcgagccgctcgatcaggacgatgtcacggatcgacagacgggccagcatgcgaggacaattcctagccgagacctatcttcttgaaggtcctgctgatccaggatccctgattctcgctcggctcgagaccgccggactttactagattatacgcgtccttgtaccagcggctgtccggaaaattgtggccgagaaccgcggctgcggtctgcgcctcgccggcgataccgatcgccatataggcctcggtgagccggtagagcgcctcttcgacgtgacgggtggtctgatactgggtgaccacggtcttgaagcggttgatcgcggcggtgaagtcgcgcttctcgatgtaatagcgtccgaccgccatctccttgccggcgagttggtcgcgcgcagcctggatcttgttcttggcctgggtggcgtattcggaggtcggatatttccgcaccacctcttcgagcgccgcgatcgccttctcggtgcggctctggtcacgcgagatgtccgggatctggtcgaaatgcgatgccgcgatcaggtactgggcgtaggacgcgtcggggctgccgggatgcagcgtgacgtaacgggtcgccgagccgatgcagctgtcgtagtcgccggcctggtagtacgaataggccgacatcagcagcgacttgcgggcccagtccgaatagggatgctgacggtcgacttcctcgaacttcttcgaggccgccttcaggtccttcttctcgttcatcatgtacaagccctcattgtagagcttgtccgcgggctcatcgacgaacgtatcgtccttggccatgaacttgtcccacagcgcgccggtgccgcagcctgagagcggcagggccagcacgatcaggcccgcagcaaaacgcagcgtgcgcgcggccttggtcaggccggagacgtcagaagaagagcgtggttcgagcgccatacgcattgccgacatgaattgtaaaacctgacgcctttgatgcggttaacggcgaccccacttcacccatgaaccgcggtcatgggtgtcatatctctcgtgccgttggcgccgtatcaaggcagccgccggcctgtttaaccgaaaaatgaccgtggaccaaccgaatacggagccattccgccgggaataaggcgacccgacgaagctcacagtctgctgtggttattacggaaattgggccgaccgcctaggcgatcaggacttgggcgatcaggacttgggcgatcaggacttgggcgatcaggacttgggcgatcaggacacgtccgggccgtaggccggggcgacgaggccgcccgccatgccggcaccggcctcgacatgtccgcggaccggccgccgcgccgtctccgattcgaccacgcgccaggcgctgcggtcagcgagcagcgccttcagcaccgcattgttgagcttgtgaccgccccgcaccgaacgatagctgccgagcagcggaaggccggccagcgcgagatcgccgatcacgtcgagcaccttgtggcgggcgcactcgttggcgtagcgcagcccctcgacgttgagcaggcgggcctcgtcgaacaccacggtgttgtcgaaggatgcgccgagcgcgaagccagcgccccacagccgtgccacgtcattcatgcagccgaaggtccgggcccgcgcaacgtcgcggcggaaaccttctggcgaaagatcgaaggagtaggtctggtgaccgatcaccttgttggcgaagtcgatctcgacttcggcgcggaacccgccggcgaacggacgaagctcgcccatcgcatcgccgatcttgacctgcaccggcttcagcacctggatgaagcggcggacggcgggctgggtcacaatgccggcctggtcgatggccgcaacaaacgccgcagcgctgccgtccatgatcggaacttccgacccatcgatttcgatcgtggcgttgtcaacgcccatgccgcgcagcgcggccagaacgtgctccgcggtcgagaccagcggcccttcgcggtcacccagcaccgtcgcgaattcggtcgcgatcacagcatcggcagtggcggtgacttcgcggtctgcaccatcgagaccggtgcggacaaaaataaaacccgcatcgacaggtgcaggtcccagcgtgagactaacaggaagaccggaatgaacgcctacgccagtcacggtggcttgcgaccgaagcgttgtttgacggctgaacttcattcgataatgcccactacccgacttcgctcaattcaagtggccaaacttccccaaggccgactcgcttgagctccccaagtcacggcagaccatagtgatttcctaaaccgcgccaactcacgcttctttaccgattgttaccccatctctgccgcattcgcgcccaagcttaaccaaattgcggcagcgaaaacggccctcggcgagtggctatctgaccaccgaaagaataattaatgatttaaaatcagttgcttgctggccaagcacaactgcatgcccgtctaaggcagaaggccccggcggttccccgccgaggccttcttcgtcgtcaaggttgtaacaaacttcagtttgcctgccggcgcaggaaggccgggatatcaagatggtcgtcgccctgtggcgccggagcaacaggcgcctgacggccgtgagcatccaatccctgaggggccggtcgctttgcatactccgataccggctgctcgttcgccgagatctgctgggcaacgctgcgggccggcttgcgctcgggcagcgggggcatcgtcggcatcgccggaccggaggcgcgggcagcgatcggcggctcggtctcttcgtcgcggcggccgaggccgacattggcgagccgctgcagcagcgacagccgggtcttctgcggatgctccgcctcaccgtcaccgctggcctggcgaatctcggcctgcgccggcatcggcagatcctcgaacttcggcatccgcggtgcccgcaccggcgaccgctccgccgcctgcgggatgaaggtctcgggcggcatcggctcgtgctgctcggccctggccgcttcgtgatccgggaacaatgtcggcttctgagcgatcggccgcaccgtgacgtcaccgtaggaggctggctgcatcggcgcctgggcggccggtgcgctgtcaggggcaaccgccgcggcgatcgccgcgagtgcggcacgttccaccgccgggcgcgcctgggtcgcagcagcaatcggagcgaccgtcacgccggtcggcggctcgagcttctgggcgcgctcggccatacgctggttgtcggcacgcaggcgtgcggtcagatcggcgagccggctctccggcgaaccgccctgttgctgcgcgggggcctgggcacgggacgcaatcgcggcctgctcgatgccggtcgcgaccaccgagacacgaatgatgccgtcgagcgattcgtcgaaggtggcgccgacgatgatgttggcgtcggcatcgacctcttcacggatgcgggttgcggcttcgtcgacctcgaacagagtgaggtccttgccgccggtgatcgaaatcagcaggccgcgggcgcccttcatcgacgaatcgtcgatcagcgggttggcgatcgcagcttcggcggcggtcagcgcgcgcttctcgccggtggcctcgccggtgcccatcatcgccttgcccatttcccgcatcacggcgcggacgtcggcgaagtcgagattgatcaggccttccttgaccatcaggtcggtgatgcaggcgacgcccgagtacagcacctggtcggccatcgcgaacgcgtcggcgaaggtggtcttctcattggcgacccggaacaggttctggttcggaatgatcagcagggtgtcgaccaccttgtggagctcggagatgccgtgctcggcggtgcgcatgcggcgctggccttcgaagtggaacggcttggtcaccacgccgacggtgaggatccccatctcgcgggcagccttggcgatcaccggcgcagcgcccgtgccggtgccgccgcccatgccggcggtgacgaacaccatgttcgcgccggtgagatgatcgcgaagctcgtccatcacctcctgcgcggccgctgcaccgacatcgggctgcgaaccggcgccgaggccctgggtgacctgggtacccatctggatgatgcgctgcgctttcgacatcgtcagcgcctgcgcgtcggtgttggcgacgacgaagtcgacgccctgcaacccggcggtgatcatgttgttgacggcattaccacccgcgccgccgacgccgaagacggtgatccgcggtttcagctcgctgatgtcagggggtgtcagattgagtgccatggttgcctctctcgattatgcgcgcgttggttcgtcccggccgctggccgcgggagctggtgaaaatgcagtgagccggggggcggtcatcagaagccctcgcgaagccatcgtccgacctttccgaagtaaccgtccgtccctgtcctaagctgccgcgtgcgccgcggttcgacatgttcaaggtgagcgtattgcggataaaccaggaggcccgtcggcacagagaacgaggcgcccttcgcctcgttcggcagccggccgaagccgagcgggcggccgatgcgcacctgacggttcaggatccgggtagcaagctcgacggtgccggtgagctgcgacgcgccgccgctcagcacgacgcgcgccctcggctctgccgcaaagggggaatccgcgagccggtcacggatcatttcgaaaatctcctcggcgcgatgccggacaatgttcgcgatcgtggcgcgagacacgatttgcggggtctcccgatcatcgcctgcagtgggaacggacatcagctcgcgcgaatccgatccgccggtcagcaccgtgccgtataaagtcttgattcgctcggcatccgcaatgcacgcgccgatgccgcgcgcaagatccatcgtgatgtgttgcccgccgagcgcaaatccggatgcgtgcacgaggcggccgccggaataggtcgcgatcgtggtcgagcccgcgcccatctcgacgacggcagcaccgaggtcggcctcgtcgtcggtcagcaccgacagacccgcgacataggggctcgacgccatggcttcgacgttgagatggcagcgctcgaccaccagcatcaggttcttggcgaccgtcgcatccgacgtcaccacgttcatgtcgacgccgaactggcgcgccaccatgcccctgggatcgcggatgcccttgacgccgtcgagcgcgtagccgaccggcagcgcgtgcagcacggtgcggccggcgccggcggcgtgacgcatgccggcggaggtgacgcggctgatgtcgtcagcggtcaccgagccgccgcggatatcggccgcggcctcgaccagctggccatgctgcctgccgccggagaccgacagcagaacggattcgacacggaccttggccatgcgctcggccagcgccacggcatggcgcaccgccttctcgcattcggcgaggtcgacgacggagccggccttgacgccgcgcgactggatctggctgtagccgatcaattcgaccgcatgggtgcggccgcgcagcgcctcgttcggcggcgacggcttgagccgcgcgatcatgcaggcgatcttgctggagccgacgtcgagcgaagccaccatcgcggtgcgcttcggcatcggacgggtcttcggggtcagattgcgatcgaggccggtcatgcgctgtcaccggccttcttcttggacttcttgtccttgaacagttcgtcgcgcgccttgccggcttcctcggacaattgcacgatcagccgatcgggcagccgcatgtcgacggcgacgatgtcgcgcgagaacagcttgtcgtccttgtcgagcttggagagcgcggcgagtgcgttgccgacatcgttctccggcaggcggacgtcgaggccgtccttgaggcgcaggttccagcgccgctcaccgacgaagatcgcggccttggtcaccgcacgcacctgcggataacggtcgagcagcgccaggaagtcctgggcgcgcgtgtcggcgcccttgcctaccaccagcggcaggttgaggaagcggcgcgtgacgtagggctcgagcacggcgccgtcggaggcgatcaccgacaggcggccgttctgttgccacagcgcgaaggcggtgcgctcgacgatgtcgatctgcagccggcccggatagagtttcaggatcgtggcatccgcgatccagggattggccttcagcttggcgcgcacggtatcggcgtcgaggaacagcagcgaggagcggccattgacgccgccgatcgcgagcacctcgtcctggctcagctgcttgcggccgttgatgccgacggtggtgatgcggaagcccgcggaattcgccagcgcgttgcgggtgtcgctgagcgccgtggtgaattcctcgacatggccgccccggacgatgccgaagccgacgctgccgaacaggatcgcgagcgtcgcgaccagcccgatgcggcgcggcagatagtgctcgaccatctggatgtagcggttcggcggctcgcgatcgatcaactgcggccgcttggcgggacgctgccggcggcgagcgagatgggcgccgacatactcgcgcagcagcactgccgctccaatagcggctgctctcaggtcagcttggggccccagcgatcgcaccgatcgggtgaggcgtcctgcaccatccattgcacgaactcgtcacgtgttgtgcccgcaaaccctgcggatcccggcacaaatcacgtctcggctagaccggtgggattagagtggccccctgttccctggttgcgatcctcgaagcggtaatccgcgacagctcacgccccggcagccaagcgctacatgcgccgccagcgttaaccttcgggcttcctggtaaacaaacggtaaatgagttcggcctggagtgaattttgatcaacgctttgagtactttgccgcgaacccgtcagcatttttgcaacagcgccgggttccatcgtaccgagtcgtgcgggttccccacccgtccggccttaacgtctggcgcggcggcggccgagctcgatctggtcgcccaggaagtcggcaaacccgatcccctgtgctttcaaggccttagggtaaagtgatgccgcggtcagcccgggcagcgtgttggtctcgaggtagaccgggccattagccgacacgatgaagtcgctccgcgagtagccggtgcaggacagcgcgcggtgcgcccgcaacgcatggtccatgatcgcggcgctgacctcgggcgcgaaccggccgggacagatctcctgagtcgacttcaaaaggtatttggctgtgtagtcgaagcctccctccgccggcacgatctcgatcggcggcagcgcgaacactgagccgtcggattgctcgagcacgccgcaggtcgcctccacgcccgagacgaagggctcgatcagatagtcttcatgcttggccgcgttgcggaccgcgacgaggtcctgctgcgcgttgacgaagatcagcccgtagctcgatccgtccttggcgggctttgcgatcagtttgccgtgcttcgcgaaggcgtcgtcgatctgctcgacgctgatgccctgcggcgcgttgatgcctgcgatcgcggcaaaacgcttcgccgacggcttgtcgaacgccaggtgcgacgacgccgagccggagccggtgaacgcgacgccgcgcatctcgcacatcgcctgcaattcgccattctcggcgcggccgccgtgcaggccgagcaccagcacgcgctgctcggcgcttgccttgtcgagcgcctggtcgagcgcgatgccatgaccgggcggcctgaaatcaacctcgaacggccgcgcgtggccgagcagctgttcggacgtcaccgcatgcacggtgtcgtcgacgtcccagaaccagagttccgcgcccggcagcgcgcgatgcagcgcctgcgcgctcgccaccgaaaccagccgctccttgttggtgccgccgaacagaatggtcaccgtcatcagcttgtcccgatccgcttgatttcccagtgcagctcaatcccgctggtctgcttgacccgttcacgcaccgtctcgccgagcgtctcgatatcgtgcccggtggcgttgccggtgttgatcaggaaattgcagtgcatctccgagacctgcgcgccgccgaccttgaggccgcggcaacccgcggcgtcgatcagcttccaggcgctgttgccgggcggattcttgaaggtcgagccgccggtcttttcgcggatcggctgcgcggtctcgcgatgggtctgcacctcgttcatgcgggcgcggatcgcatccgcatcggtgatccggccgcggaagcgcgccgaggtgaagataacggacgcatcgacgccgctgttgcgatagacgaacttcatctcggcattgccgaacgtgtgcctggtgccgtcgcgactgacgccggtcgcctccaccaacacatccttggtctcgccgccattggcgccggcattcatgcgcagtgcaccgccgatcgtaccggggatgccgaagaagaattccatgccgccgatatttgccgcagccgccgtctcggcgacgcgcttgtcgagtgccgcggcaccggcggtgacgacatcaccgtcagcactggtctcgccgaatgcgcgcggcgccagccggatcaccacgccgggcatgccgccgtcgcgcacgatcaggttggagccgacgccgacgacatagaccggcagctcccgcggcaggcgcttcaggaagtaggcgagatcggcttcatcggcaggcgtgaacagcacctgcgccgggccgccgacacgaaaccaggtcagctcggccagcgactggttggccagcagccgcccgcgcagctccggcatcgcggctttcaggtcgggcgtgatgtcggggaaggtcatgatgcggcaattaatgcaagagctggattgagagcgcagcgtgctgcgatttccgtcagcgcctggggctcacccctctccccacccctcccccgcaaggggggagggagccggatgagcgtgctcgcctcaccccgtatcatgcttccgctctgactcgttgagtgagttagggacgtaccagcggatgggttccctccccccttgcgggggagggttagggagaggggtgagccgcacgggcggtgttcgtaaagggcgacgaccgtcatcaccccagcgccttcaattcgccgggcagtgcataggcccattgcgtgatgttgccggcgccgaggcatacgacgaggtcgccggacttggcgaggccgtgaacgatctttgcaagttcgcccgggttcggcagcggcaccacgttgcgatggccgtgggcgcgcaggccggcggcgaaatggtcgcggtcgacacctgcgatcggcgcctcgccggccggatagacctcggcgaccacgaccgcatcggcgtcgttgaagcaggtgcagaattcctcgaacagcgactgcaggcgggtgtagcgatgcggctgcaccacggcaatgatcttgccgtcggtggattcccgcgccgccttcagcacggctgcgatctcgaccggatgatggccgtaatcgtcgatcacggtgatgccattggtctcgccggtcttggtgaaacgccgcttgacgccaccgaagccggccatcgcctggcggatcacgtcgtcggacacgccgagctgatgcgcgaccgcgatcgccgcagtcgcattggatgcgttgtggcgcccgggcatcggcagcatgatgtcctcgatctcatgcgtcgcgccggtcttgcgatcgcggatcgccaccttgaatttcgagccgccacccatcggcgtcagatccagcagctgcgcatcggcctgcggattctgaccataggtgatgatgcggcgatcctcgatcttgccgaccagggtttgtaccaccgggtgatcggtgcacatcacggcaaagccgtagaacggaacattctcgacgaaattgcggaacgcatcctggatcgcctcgaaggtcttgaagtgatcgagatgctcgggatcgatgttggtgacgatgaccacgtcggacggcagcttcaggaaggtgccgtcgctctcgtcggcctcgaccaccatccagtcgccggccccgagccgcgcgtttgagccgtaggcattgatgatgccgccattgatcacggtcggatcgagccccccggcgtcaagcaaggtcgcgaccatcgtggtcgtggtggtcttgccatgggtgccggcgatcgcaacgcagctcttcagccgcatcaattcggccagcatctcggcgcgccgcaccaccggaatgcgccgctcacgcgccgccatcagctcgggattgtcgcgcttgatcgcagtcgagaccacgacgacgtcggcgccgtccacgttctccgcggtgtggccgaccgaaaccttggcgcccttcttgcgcagccggtcgagattgtaattgtcggacgcgtccgagccctgcacggtgtagccgagattgatcagcacctcggcgataccgctcatgccgatgccgccgatcccgacgaagtgaatgggtccgatctcgcgcggcagtctcatgatcgtcgttcctcttggagcgcttcaatcgctgtttggcgcaatgacaacaagaatcgcatagtgctcgatgcttccatatggtcgcgggcttcccagaagactttccaacgaaaagggctgaaggcacacctgatctataaccggttgagacaagtcaatcggataaaatccctccatgagccatttgaaagttccggagctattgcaatcaagcccgatctcttgcagctgcgatctgtatttcatcaagtcggaaaggaacggcagatcccatccaagttgcgtattgtaataagaggtcgcgatttcaaggcacttgaactccacctcaggcttgagcaaaacgcgtcggccaacaagccgctgctgcctgcacgcatgccccgcggcttggtgattgaggagacaccatggatggtccgcagccaacacagggaccatatccgtgaaagcaacgaacgcggccacgcgcattcgttgaatggtttccgcgtgcgacgaactgccttcgacattgcccagccaatctgacacaggcgcggttcctgtatccgtccattgggtggcggcccacgcttttcgaagctccggcggtgcgaacgggttgtccggagacccaatcgacctcagtgaaatcatccggttatcataggaatggaaaccgcggagcggcccaagaacagcttcaacttctgtagcgttgaccgtcatgcgccccttttacaacgcagctaccttcgccaccagatcagccagccgctcggcggcatcgagccggccgacactgcgcgcggcgtccgccatcgcggtcagtctcgagggctcggcggcgaaggccgagatctcggccgccagccgctccggcgtgaagtcgccctgcgtgatgcgcagcgcgccgcctgcctgcgacagcacgccggcattggcgaactggtcctgatcgatcgcgcccggcagcggcaccaggatcgagggccggccgatcgcggcgagctcggccacggtgccggcgccggaacgcgagatcaccagctggctcgaggccagccgtgccggcaggtcggcgaagaacggcgccagctcggcgttgatcttgagccggtcgtagaccgcgcgcacccgctccatgtcctcttcacgcacctgctgggtgacgatcaggcgactccacagcgcgggatcgagctgctcgatcgccggcggcacgatgtcgctcatcacccgcgcgccctggctgccgccgaccacgagcaggcgcagcggcccgttcacttcgggcggtgtgtatttcaccgcagccgcggcaaggatcgccgggcgcatcggcgtgccgacggtggtggccttgccggcgagggccggatcgcgatcgagcacgccgggcagcgaggtcgcgatcgcgttgacgcggccggagaggaagcggttggcgcggccgagcaccgcattggcatcatggatgatcccgggaacgccgagcatccgcgccgccaccagcggtggcaaggtgggatagccgccgaagccgaccacggccgcaggcttcagccggcgcatcacattggcggcgaccagcgtgccgtagccgagcatcagcacggtttgtgcgagcgagatcgggttgcggctgcgcacggtcgcgctcggcaccagctcgatgctctccttgccgaacaggccggaatagcgcagcgcgcggccgtcggtcgcgagccggacccgcaggccacgcctgatcagttccacggcgagcgcttcggccgggaacagatggccgccggttccgccggccgccagcagaatcaggggcggattgtccatagcttccagataactgacgccgcagtcacagtcacctacgcgtaggcgcgctgcgcgctggcgccctccatcgattcgatctcggtccgcggccgctgccgggtcagcgccagcatcatgccgacgccgtaggcgagcgagacgaacgacgagccaccataggagatgaacggcagcgtcatgcccttggccgggatcagttgcagattgaccgccatgttgatcgtcgcctgcacgccgaacaggatcgcaagcccagaagcggcaaagcgcgagaacatgtcctcggtggcataggcccgcgtcagcgtgcggatcacgatgaagccgaacagcgcgaccagcatcaaacagaggatgatgccgaactcttccgccgcgaccgcgaacacgaagtcggtgtgactgtccggcaggctacgcttggcgatgccctcgcccggaccgaggccgaaccagccgccgttccagaaggcttccatcgcggtgtcgacctggaaggtgtcgccggaggccggattcatgaagcgcttgatgcggccggcgacgtgcggcaccagcagataggcgccgaacaggccggcgccggcggcgccggcgagcccgaacacccagatcatccgcatgcccgcgatgaagaacagcgcgccccacacggtgaggatcagcatggtctgaccgaagtcgggctccatcaccagcagcgtcaccagcgtcagcagcagcaccagtgccatcgaggtcgccggcatctccggccgcttggtcgattccgcaaacagccatgccgcaacgatcacgaaagcgggcttggcggcttcggaggcctggatgttgaccccgagcagcgtgatccagcgccgcgagcccttgacctcgggcccgatcagcagcgtcagcacgatcagcgcgatcgcgaccgcgaacacgatcagcgcggtgcgccggatctgccgcggcgtcatgaacgacaccccgatcagcacgatcagcgacggcaccaggaacatgacgtggcggttgaagaagtggaacggatcgagcccgatccgggtcgcgaccggcgggctcgccgccagcgacaggatgacgccggccagcatcaacgcggcgatcgcgacaagcagcagcttgtcgacggtccaccaccagtccgagaacggggtgcgttggtcacgggcgagcatgggcgtccccagatggcagagataacgtccattcgtggcgcaggatggtttccaaggggttaacgggttgggtaacttttgagggaggtggatttgtcgcctcaagcacactgtcgtcctggcgaaagccaggacccataaccaccgcactcagtaatgaacgggatcgcggccccggcgtcgcgcaacaattgagatttggggtaatgggtcctggctttcgccaggacgacaccgaacgtgttgcgaaacccatcccataactcgggcccgtcgtcattccggggcagcccgcagggctgagcccggattccattcatccatctagcattggcccgatggattccgggctcgcgcttcgcgcgccccggaatgacggagaggttgtgcctacaccaccggcttgacgccgggcagcgcctggacgatgtcgcgaaaggcgttgccgcggatttcgaaattgcgatactggtcgaacgaggcgcaggccggcgacagcagcacgacggcctcactcagcccggacacctcggcatcgcgcgcggcgcttgagatcgcgacctcgagcgtgccggacatctcgtgcggcacgtgcgcgccgagcgtgccggagaattcggccgccgcctcgccgatcagataggccttgcggatgcgcgggaagtattcggtcagccccgtgatgccgccggccttcggcttgccgccggcgatccagtagatgtcggcgaacgacgagagcgcatgcgccgccgcatcggcattggtgcccttggagtcgttgacgaacagcacgtggccgcggcgaccgacctgctccatgcggtgcgcgaggcccgggaagctgcgcaggccgttctgcaggacgtcgctggcgacgtccatcgccagcgcgcaggccgaagcacatgcggcgttctgcgcattgtgcaggccgcgcagcgagccgatgccgccgagacgcgcgatctcgctgcgtgccgcaccctgcgcacgcacgatggtctcgtgctcgacatagaggccgtcgggcagcgggttcttcaccgagatgcggaccacgcggttgccggcacgatcgagccggtcggcgatgttacggcaccagatgtcgtcgacaccgacaattgcagcgccgccctgctgcacgccggcgaccagccgctccttgaccgcggcgtaatgctccagcgtgccgtggcgatcgatgtggtcttcgctgatattgatcaggatgccgaccgagggatcgagcgacggggtgagatcaatctgataggacgacatctcgacgacatggacccggcccatccgcggcggctccagcgacaggatcgcagtgccgatattgccacccatctgggtgtcgtagccggcaaccttcatcagatgcgcgatcagcgcggtcgtggtcgacttgccgttggtgccggtgatggcgacgaacggcgcgttcggcgcgtgacggcgccgctcgcggcagaacaattcgacgtcgccgatcacctcgacgccggcctcgcgcgctttcagcacgctccagtgcggcgccggatgggtcagcggcgcaccgggggtcaggatcagcgcggcgaaattcacccatgatacggtacgcaggtcggcagtggtgaagccggcctgcgccgccctcgcgacattgtcggcattgtcgtcggccgcgatcacctccgcaccaccggccttcagcgcgtggcagctcgcgagccccgagccgccgagcccgaacaccgcgaccgtcttgcctgcgaaggaggtgaccgggatcatggcggggctcagcgcagcttgagggtggagagaccggcgagcgccagcatcaccgagatgatccagaaccggatcacgatctgcggctcggtccagcccttctgctcgaaatgatgatgcagcggcgccatccggaacacgcgttttcccgtgagcttgaacgaggtgacctgcacgatcaccgagaccgcctccagcacgaacaggccgccgatcacagcgagcacgatctcgtgcttcaccgcgaccgcggtggcccccagcatgccgccgagcgcaagcgagccggtgtcacccatgaagatcgaggccggcggcgcgttgaaccagaggaagcccaggcccgcgccaagcaccgcgccgcatagcaccgccagttcgccggtgccggcgacgtaattgatctgcagatattccgagaacaccgcgttgccggtgagatacgagatcatgccgaagcttgccgccgcgatcatgaccggcacgatggcgagaccgtcgaggccgtcggtcaggttcaccgcattgccggcgccgaccatgacgaaggcaccgaagatcacgaagaaccagccgaaattgatcacgaggtccttgaagaacggaatcacgagcgaggtcgaggacacgtcgcgcccgagccggaccagcgcgtaggtggcggcgaggccgatcaccgcctcgatcagcaggcggagcttgccggcgaagccgctatgtgactgctttgtgaccttcagatagtcgtcatagaagccgacgaagccgaagccgagcgtcaccgccagcacgatccagacatagggattgagtggattggcccagagcagcgtcgacaccacgagcccggacaggatcatcagcccgcccatggtgggcgtgcccttcttggagatcagatgcgactgcgggccgtcggtgcggatcggctggcccttgccctgccgcagcctcaaatgatcgatgatccagggcccgaacaggaacacgaacagcgcgccggtcaccattgcgccgccggtgcggaaagtgatgtagcggaacacgttcagggcgctacggaatgcgccaaaccccggaacggtgttggacagctcgatcaaccagtagaacattcaaagggtcctataccgcttcttcgtgcgcgggtttgtcggggaagcgcttttccagcgcgctgacaatgcgcttcatcttcgatcccagcgagcccttcaccatgatcacgtcgccggcacggaccgcggcgacggcctgcgcctcgagtgccgccgagctctcggcatagcctccccgcttgccggtggaaagggcatcccacaaattccgcatcagcggaccacaacaatatacgaggtcgatgcggttggcggtcacggcctcgttgaggttacgatgcagctcgggcccggtcggcccgagttcgagcatgtcgccgagcaccgcgatgcgccgaccatgcgccccggtcggggcctggccgagcacgttgagcgcggcgcccatcgaggccgggttggcgttgtagctctcgtcgatcagcgtcgcctcgccatggccgacctcgagcgtgcgacgaagaccgcggccggtcggcgcctcgagttgcgacagcgacagcgccgcacgcgcgatatcggcgccgagcagcgcggcccccgcgagcaccgcgagcgagttcatcgccatgtggcggccgggcatgccgatcttgtaggtgatgtcgtgatccaggatatccgcatgcaccgccgagcaggtcgcgtgcagcgagaggtcgatcagccgcgcttcggcacgcttgtcggcaccgaacgagacgatgcgcgagatgccggccttcttcgcctgcttctgcagccgcgcgaattgtccgttgtcgcggttgagcacaacggcaccgtccggctcgagtccggaaaagatctccgccttggcgtcggcgatcgcctcgatgccggcgaagaattccagatgcaccggctcgatcgtggtgatgatggcgacgtgcggccgcaccatcttcaccagcggagtgatctcgccggcatggttcatgccgatctcgaacaccgcaaagcgcgtgctcgccgggcagcgcgccaacgacaacggcacgccccagtgattgttgaacgatgcgaccgaggcatgggtctcgccctgtgccgatagcacgcgacgcagcgcctccttggtcgaggtcttgccgaccgagccagttaccgcgatgatcttcgcattgagccgcgcgcgcgaggcatgcgcgagttcgacgaggccggcgagcacgtcgtcgaccaccaggagcggcgcctcggcgggaaatttttcgcgttgcgcggcttcgaccacggcaaggccggcgccggccttcagcgccgcctcgacgaaggcgtgtccatcatggacgtcacccttgatggcgaaataggcctcgccctttgcaatggtgcggctgtcgatcgagagaccggtgacgccgtccggcaacgcgccttgcgtcgcggcgcgcatcgcggtcgccatcgcatccgaggtccacaacatcgtgctcatgcgccctcctcggccaatgcttttgcgaccgcttcatgatcgctgaacggcagcgtggtgccgccgacgatctgcccaacctcatggcccttgccggccacgaccagcgcatcgcccggcgcgaggccggcgatcccggcgcggatcgcttcggcacggtccccgatctcgcgcgcgccttttgcggtcgccatgatcgcagcacggatcgcctcgggcctctcgctgcgcgggttgtcgtcggtgacgatgatttgatcggcattctcggcggcgatcgcgcccatgatcggacgttttcccgcatcgcggtcgccgccggcaccgaagatcacgaccagcctgcgcttggcatagggccgcagcgcctgcagcgccttggcgagcgcatcgggcttatgcgcgtagtcgacgaagatcggcgcgccattgtgctcgccgaccagttccagccggcccttggcgccttcgagatgttcgaggcagccgaacacgtcatcggcagcgctgccggtgccgatcgcgagacctgccgcgaccagcgcgttctcgatctggaattccccgaccagcggcagccggatcgcataattgcgtccgcgatgcgcgatcgcgagcctctgggcaaagccttcgatcgcggcgtcggcgagcctgatgccctcgcccgcgtccgcgttgcggccgacggtgatgatgcgcaggccgcgcgtccgcgccgcgtcgatcacctcgggcgagcaatcatgatcggccgagatcactgccgcgccgccgtcgacgacgagatcgcggaacagccggagcttggcattcaggtaatgcgcgacgtcgggatgataatccatgtggtcgcgcgacagattggtgaagccgccggcctggatgcgcacgccgtcgagacgatactggtcgagcccgtgcgaggaggcctcgaacgccagatgggtgacgccgtcgcccgcgatctcgtcgagctggcgatgcagcgcgatcggatccggcgtggtcagcgagccgtaaacagtgcgcttgtcggagacgagaccgatggtgccgatgcttgcggaggagtgaccgagccgctgccagatctggcgcgtgaaggcggcgaccgaggtcttgccgctggtcccggtcaccgccgcgatcgtcgcgggctggcgcggatagaacgtggcggcggcgagcgccagcgcgcggcgcggattgggcgtgacgacgaatggaacgcgaggcgtgccctgcggccgatggtcgccggcaatcgcaaccgcgcctgcggcgatcgccgcatcgacgaagcgcgcgccatcggtcttgctgcccgacagcgcgaagaacagatcacccggcttcaccgcacggctgtcgaccgcaagcccgccgacgaccgtggcatcggcacttggatcgccctttggatcgatcgtggcatcggcgctgaagaggtcgcgaagtctcatgatcttccagtctggccggcgccgttctggcgccgcgtgtttatacgccttactgggttgctctcgatgccgcaagaataaggcggtcggacggcggcaggtcgaagcgcggttcgacgcccaaaagcggcgcaattcgggcgatcacattgccaccggtcggcaccgcgttccagcccgaggttatgaaaccataggtttccttcaggggctgcggctcgtcgagcatgatcagcagctggtatttcggattgtcggcgggcaggatcgcggtgaaggcgttcaacacgcgcttcttggcgtagcggccgttgatcaccttctccgcggtgccggtcttgccgccgatatagtagcccttgacgtcggccttcttcgcggtgccgatctcggcgttcagccgcatcagataacgcatcttgtccgaggtctcgggcttgatgacgcgtctggccagcgccatcgcctcctgctcgctgcgcttcaggaaggtcggcgggatcagatagccgccattgaccagcgcgtcgatccccatcaccgcctgcaacggcgccaccgcgatgccatggccgaacgagatcgtcaccgtattcaattcgccccacttcttcggcacgatcggcgaggcgctctccggtagttcggtgcgcagtcgctcgagctgccccatcttgcgcaggaaggccttgtgcgcgtcgacccccatcgccagcgcgatgcgcccggcgccgatgttggaggaatagtagaacacctccttcatgttgatcatgcggcccatgttgtgatcgtcatggatcgcaaacttgccgtagtgcagcggaccgcgcgcatcccacatcgagttgaggtcgaaccggccggagtcgagcgccatcgccagcgtgaacgccttgaaggtcgagcccatctcgtagacgccggtggtcagtcggttgatacggtccggatcgtgcgcctccttcggattgttcggatcgaaatccggcagcgacaccatcgcgacgatctcgccggtgcgcacgttggagacgagacccgaggccgccttggccttgaatttctccttggccttgatcagttcgtcgcgcagcgcgtgctcgacgcggaggtcgatcgacaattcgaccggcttctgcagccggtcggtggcgaagcccgcgcggtgcagatcggccagaccgttattgtccagccacttctccatgccggcgatgccctggttgtcgatgttaacgaggccgatcaggtgggcgacctcgttgccggtcgggtagacgcgcttgttctcgcgcaggaagccgacgccgggaagaccgaggcggtggatgtcgagctgctgcttcggtgtgatctcgcgcttcagccagacgaagcccttgcgcgacgacaggcggtcgcgcacctcgctggtgtccagatcgggcaaggccccggtcaagagctcgatcgcctcgtccttgtcgatcagccggcgcggctcggcgaacaggctcggcgccttgacgtcggtcgcgaggatcgcgccgttgcgatcggtgatgtcgggcctggcggtcgcgatcgcgtcctgcgaggcggtgcgccgcgcaccatggctgtcggcgccgaccgcgaacagcatgagccgcccggccagcacgcaatagaccgcggcgaaagcgaggatcgcaagaccgacgcgcgcgcgcgccttggcggcacggtcgacattgctgccgtacaacagcgagcggatcagccgctggcgcagcggctcggcggatttcgctgccggtttgttggcgggcgccggatcgatcatggctggtccggtcattgctggtctccgccgccctgcccggactcatcggacgcgggctggtcggcggctggctggtcggccgccgccttgtcgatcgatccggtcgtgctgtcgggcgcgacggcggcctcgatggtgtcgatcatcgcgccgatcggatcgcgcgaaccgggccgcgtgaagctcggcggccgctccggcaggttcttcagggaatcatactggttggcgttgaccggcttcagcggcagatgccgctcggccagtccctgcaacctgagcggcgcatcgagcttggcccattcggcgcgcagggtggcgatcgcgttgcgctgctcgcggatctcggcattgagctgcagcacgcgttcgacgcgcgcggtcgattccatcttgatgcggtagacgtaggacgccgcgaagatcagcatgccgatgacgaggagatgaaggaggcgcatcgtcagcctcctcgcttcaggtcggcgaggcgcggccaggacggcaagtcgtcgtccgcatgcgccggcgtcgcggtgcgttcggctgcgcgcagttttgcggaacgcgcgcgcggattggccgcgatctcggcctcgccgggcaccaccggacgcttggtcaggatctgaaagctcggcgccgcctgtgcgacctcgggcagatgccgcgacccggccgaaaccttgccgcgctcgctgaggaaattcttgacgatacggtcttcaagcgaatggaacgagaccacggcgagccggccgccgggcttcagcacgcgctcggccgccgcgagcgccagatagagctcgtcgagttcttcattgacgaagatgcgcagcgcctgaaaggtccgcgtcgccggatggatctcgttcggcttggcgcgcacgactttcgcgacaatgtcggccagcgcgtccgtcgtcgtgatcggcgcatccctgcgcgcggcgacgatggcgcgtgcgacgccgcgcgaatggcgctcctcgccgaagatgtagatgatgtcggcgagctgcttttcggtcgcggtggccaccacgtccgccgcggtcgggccgttctgccccattcgcatgtcgagcgggccgcccaggcggaaggagaatccgcgctcggcctggtcgagctgcatcgaggagacgccgacatccatcacgacgccgtcgaccgtctctgcgccctgcgcggcgcagacctcggcaagatcagagaagcgcgcctcgaccagcgtcaggcggccgcctgcaccgtcgaccaggtcgaaaccgcccgcgatcgcggtgcggtcgcggtcgatgccgatgacgcgggttcctgcgagatcgaggatcatgcggctgtagccgccggcgccgaaggtggcgtcgacatagacgccgtcggcgcgcggcgcgagatacgcgaccgcctcgcggcccagcaccgaaatgtggcggggcgcacgctcgctcatgcgccgcccccggacggggccgcgtaactggcatgcaagctggctgcgcgccgactcattgcgtctcgaatcctcgcgccttacccgaccattccggtgaaaaagccgctgcgtgatcccagcgccaactcccgtcctcggccgcaaatcctgatatccgaccggaattgggagggtttccatgggatttcgcgcaacagcggaccttggccgtcccccgagaccggttcggcacttcacctctcagtaacggcacttaacgttaagaaaacgttgatgatcggttagcggaatcgcgcgactttgatcggctttcgagtgatagcctcggcgttcgctccgggcatccagcgcgcgggcaacctgcagccgatggaacccgagaggccgattgcgcggccctgcacggtaaaggaatagtaaacgcctatttgtttatcgatatgtcaaaatgcgtactccaagtttgggtttgagtgattcgtatggcttctggttcgtcctcgtccggcaacgctgattcgaagcgtcagcgcgtccttcctgttccgaagggcgtggccgacgtgaagacgttcacgccggattcctcgatcgcctccgacgtcatcccgtcggtcaatttcggcgaccgcgcgggcgaccggcagcccgacatgatcctgctgcactacaccggcatgcccgatgtcgagggcgcaatcgcccagctctgcaccgccggcaccgaggtctcggcgcattacatcgtgctcgaggacggccgcatcgtgcaatgcgtgccggagagcaagcgcgcctggcacgccggcgtctccgcctgggccggcgaggaggacatcaattcctgctcgatcggcgtcgagatcatcaatcgcggccacgattggggctatcccgacttcccgctgcgccagatcgcggccgtcatcgcgctgtgccgcggcatcatgcttcgccgcagggtggcgccgcatcgcgtgctcggccattccgacgtggcgccggggcgcaagaaggatcccggcgagaaattcccgtggcactcgctggctaattccggcgtcgggcactgggtgcagccggcgccgatcgtgcgtggcgacgcgctgcagctcggtgcgatcagcgacaacgtctccaacatgcaggctgcgttccgccgttacggctacaacatcccgaccaacggcaagttcgatggccccaccatggaggtcgtcaccgccttccagcgtcatttccgccccgagcgcgtcgacgggatcgccgaccgctccaccatggcgacgctgcacgcgctgctcgagagcctgccgccggatgcggcggcgcaagtcgcggcgaaggcgaagtagcaccagcgatcgcgcgctccatcgtcattgccagcgaagcggcgaagctatgacggagagtgacgcgacgatcaccccagctcggcgatccggcgtgcatagagccgccgcagcggctcgagttgcgtcgccgcggtggccgcgagatacgcctgccgcgcttcgtccttgcggccgaggcggcgcagcaggtcggcgcgcaccgcgggcagctggtcatatcccttcaaggtgccgcgcgcatccagcgcatcgatcagatcgagcgcgcgcgccggaccgtcgaccatcgacaccgcagcggcgtgattgagctcgatcaccggcgatgggctgatgcggagcagcacctcatagaggccggcgatctgcggccagtcggtgtccttgtaacttggcgcacgcgcatgcagtgcggcaatcgcggcctgcaccgcataggattgcggccggcccggcagctgcagcgccgcctcgaccagcctgacaccgtcggcgatctgctctacatcccacagcgaacggtcctgctcctcgagcagcacgatgtcgccgccggcggtctggcggccggcgcggcgcgcatcatgcagcagcatcagcgccaacaggcccttgatctcgccccgcgccggaatcaatccatcgagcagccgcgccagccggatcgcctcgcgcgcaagatcgggccgcatcaggtcctccccggcggtcgcggcgtagccttcggtgaagacgagatagatcaccgcgagcacgcctgacagccgcggctccagcgcctcgcgctccggcacctcatagggaatgccggcgagcttgatcttctgcttggcgcgcagcaggcgctgcgccatcgtgtcttcgctcaccaggaaggcgcgcgcgacctgcgccgtcgtcagcccgcacaccgtgcgcaaggtcagcgcaacctgcacctcggcggcaaaggatgggtggcagcaggtgaagatcagccgcagcatatcgtcgtcgagcgtcgcatcggccggctcggacgatggctccgcatccagcaacaattgatgcgtcaactcctgctgcttgccgcgaaacgtcaccgcgcggcggacgcggtcgatcgccttgttgcgtccgacattgaccagccaggcgcgcggattggcggggaattcaccgatcggccagcgctgcagcgcgaccgcgaaggcatcctgcagcgcatcctcggccagatcgaaatcgccgacgaggcggatcagcgtggcgagcgcccggcccgcctcgtcgcgaaacactttttcgatctggctcggggtcatgaccatcgatcgttgctcggcggccgcgcccggcgacgcgaccgccgtgttcatcggagatgacggcgctatcgcgggttgtcgtagatcatgacaggcctgacttcgatcgagccggtcttggcaccgggaatccgcgccgcgaggccgagcgcagtgtcgagatccttggcctcgaccagatagtagccgccgagttgttcgcgcgtttcggcgaacggcccgtcggtcgtcagcgtcttgccatcgcggacccgcaccgtggtcgccgtcgacaccggctgcagcccgtcgccagccttgaagtgcccgctctggatgatggactgggtgtaagcgccgtactccgccgtcaccgccttgcggtcgtcggcattcatacggccatattccgcgtcgctccggtagatcagcaacaggtactgcatctcatctctcctcttgatcggctggatcgccgacacccagtcgaacgggcggcaggcgggacgactgttcaggataaattattttggcggccctggcggggctaatccggcttgacgggaccgcccgaaacgcccatgccatggacgtcagtcggccggacggccgctcccgctggtgccgaaaggccgcgggggaggaaagtccgggctccatcgacatacggtgccggataacgtccggcgggggcaaccccagggaaagtgccacagagaacgaaccgctccctcctcggaggaagtaagggtgaaaaggtgcggtaagagcgcaccgcgtgtccggcaacggagacggcatggcaaaccacaccgggagcaaaaccgaatagggacggcaacgcggttagttcgcgcatgcgcgataacaccgcagggcgatgtcaggcccgctgtccgggtaggttgctcgaggcaaggtgcaaaccttgtcccagaggaatggccgtcacgtaccattcgaaagaacggtgccctacagaacccggcttacaggccggctgatactttggagtatgaggggcccggcgcaacacgccgggcccctcgccatatccggcaccacaatcgcgcctcatctgctagactacccgcttcgcggaggatcgcagatggatcttcagaagatcatggcgaaggcccgagacgtcgccaagagcaccggcacgatcacgaccgaacaactcaacggcctgtgcccgaacagtatggagcccgaagacatcgcgactctcttcgcggctctgcggaccgagggaattcgcctcaaggacgacgaagcagaaaagtaacagccactcgctggaactggacgtgtccgtctgcccgagattcaagaaaatcaagaggaggaatggtaatgtctgtcgcctgcaagttcgaacgcagcattctcagccacgaggaatacgaggccatccgcctgacacatcaccccgccatctacggcgtcgaggtggctgagctcgaggcgatgcgaccccgcttgcgcaagatgcgcgacaaggagcgaacggtcggccgccacaagcagcgtgagagccgcggcaagaccgaggcgcgcgggacgagctttccgggaaccgccgcgcatgcttcggaacggaagcaagtatttgcggcggcgctgaagcgggtgaacacggagctcaggcgccagcacaatctggcgacccggacggcgcatgtcgaagccgcccgtaaggccctcgcgctgcaccgggccgcgaacttcacgacgcgtcccccggccggtgccaccgcgagcgaaggcatggcgccgaagccaagtgaacgccgacgaaagatcattgcaggcacgaagatcggacgggtgtcgcaggcgaccaaagtcgcccaagccgtgcgcgacgcgcgtggtgcttgacgccgtcttgttggttccgggcggtgcctggcatcgctcccaaaattgcggctcgtcaggacacgatctcctgcagcgttggccatcagcgcctcgggcgcggtgacgttcggcgagtggctggcgtcgatctcgaaagagcgccagccgtcgccgtcctgcgtcgccaggcccatctgcgcggcggtcggcgcgtcaaaacgacccgaacgcggtgccgattgcgatcaccgcgatgagtgcgatgacggagttcatgatcccgaccatgacgatgtcgagatagctgtcgcgatgcgtaaggccgcagatcgcgagcaggctgacaaccgcgccattgtgcggcaggatgtccaaagttccggagccaatcaccgccacacggtgcaaaaggccgggctcgatgcctgtctgcgcggcaagttccatatatgtcggccccagcgcatcgagtgcgatcgtcaagccgccggaggccgatcccgtcagcgcggcaagcatgttcgtcgccaccgcaagtgacaccagcgggccgccttcgattcccagcacccagtcgcgcaccgcgccgaaggcgggcagcgacgcgataaccgcgccgaaaccaaccaggctcgcaacgctcaacgccggcaggacggacgcattggcgccggcgtccatggttcgccgcagcgcggccagtctcgtccagttgcacaggatgacggttgcaatcgcggccgccagcgcgacgacgaccgaccaaacgccggcgaccgccggcagcgacgtgcttccccagcgctgctcggccaggaatgcgaaatcaagccgcggcaggatgagaagcgacatcgccaggttgacggcgacgacgacgatcaggggcagcacggcgttgaagatcgggacggccgcttcgctgcgatgcccgtggcgtatctccgccgggtcgaattcccgcgccgtcgtcgcccgctcgcgcaccagctcatcatcggctgcgtcgccggacgccggcggcggctcggcgccatagccctcgtttgcgcggcgggccgtcttctccgcccgcagcaaccaccacagcccgatgccgagcatgacgatcgcggccacgatgcctaggccgggcgccgcgaacggcgtcgtgccgaagaacggcatggggatcgcattctggatcgacggcgtgcccggcagcgccgacatcgtgaaggtcgaagttccgaggatgaccgccgccggcaccaggcggcgcggaatccccgccgtgcgaaacagcgattgggccatcggcacgatgacaaagaacgccacgaacaggctgacgccgccataggtgaccaatgcaccggcaagcacgaccgcaaggatgactcggcgctcgcccaaccgctcggtcatgaagcctgcgaccgctgccaccgcgccgctgtcgtccatcagcttgccgaacacggccccgagcagaaaaatcggaaagaactgcgcgagaaattccgccgcgctggtcatgaaggtctgcgtccagctcgcgagcaagggctgaccgccgaatgccgcggccaccagcccacagagcggcgccagcaagaggacactccagccgcggaacgcgagacagaccagcaggccgagcccgacgagaatgccgagaagccccatcgcctcagcactccgtcagcaggatgtcgagatcggccgtcgaacgctggccaatatccacgccgtgcgcatcgaggaattcgccggcggcgcgccgtccttcctcctgcagcttggcgacgaatgcccattctgcattgagcttggacgacgaaccgaacgtcgcgagcaagtcgctcttgatccgatgtgtcttcatctgcgcccagcgcgccccctcgccggtgccgggatcggcgacctgacggagcagcgcgatcatccgcagctcctttgccagtggcgaattgaacgagatttcgttgaggcggttgaggatatcagcggcggagcgcggctcctccggccgctcggtcggattgatctggacgacgatggtgtcccgcgcgtcggtctcacggaccagcggcgtgatcgtcgggtttccggcatagccgccgtcccaatatggctcaccgtcgatctcgacggcccgaaacatcgtcggcaggcaggccgacgcgagcaggacatcggcggtaatctccgcattacgaaagattcgtccgcgccccgtccgcacgcgcgtggcggtcacgaacagcttgatcggtgcgcgcgcgaggcgctcgaaatcgatgctctctgccaggatccggcgtagcggattgaagccgagaggattgagatcgtaaggcgagagcacccgcgatatcaaatcggtgaagaaataggccggagagttgtcgagcgaccatcgtcccatcaggcggtcgagcggcgagcgttgcagcggactgaacgcggcggcacgcgaaacgctgcgccagtatttttcgagggcctcgcgcgcgccggtggcgccggccgcggcccagccatccgccagcacggcggcattcattgcgccggccgatgttccggaaatgcccgcgatctgaaaccacggctcttccagcagccggtccaggacgccccacgtgaacgcgccatgcgatccgccaccttgaagcgccaagtccacgagtacggggcttcggttcatcggtccacgcccacatcgtttcacgccgcgctcggattatgtcgcagatcgcctgaacaagcgagatcaagttgccgtcgccgttgacgtcaaacgatggttcgtgacatcagctttgcccgacattgttcaaaaaagcgacacacggatacggcgtcggtagacctgctgctacccagcctgggccgtgatctcctcgagcatcgccatcagcgcctccggcgcggtgacgttcggcgagtggctggcgtcgatctcgaagtagcgccagccggactcgtgcttcgttcgcctggcaaactggccgaacgtgtcggcctgcgtggcacgggtggcatagatataactgcgcggcaggtcggtctcgccgcgcttcaactgcagcttctgctcgaagcatttgatcggcatgtcgaccctgcgcgcggtcagccattcgacatctgcgggagacgtgtccggcggcgtcggcatcggcggaatgcgccagccgtcgccgtcgctcgcgagttcacgcatggtctcgatggccgcttcgttgagatcgaacagcgactggccgtcacgcggcacgaaggcgtcgatatagatcatctgcgcgatacgctcgcgcacccggtcggcgacgccggtcgcgaccatgccgccataggaatggccgaccagcacgatgtcgcgcaggtcttcgtatgaaatgacgttgagcacgtcctggatatgcgcttccaggtcgagcgcctgatgcgcaaggtgcgcgcgctcgccgagtccggtgtagctcggcgtgatcagccggtgcccggcggcctgcatcaagggatgcatcttcttccacgcccatcccgccgaccaggcgccgtgacagaccagaaaggtttttggcgggttcgcagtcgacacacttgcagtcatgggcacgcttccattccgattatcgttgatgagccgcgattttgaagtgtacccacagccaccgtcgtgtaaacgtcccggcaacgatcataagaacgagatgaggaatgaccacggcgagctacgccatactgttcttcggcgcgcttgccggcggtttcgtctccggtctcgccggcttcggtaccgcgctgatggcactcggcatctggctctatgtgctgccgccgacacttgcggtgccgctggtgctggtctgctcggtgatcgcgcaggtttcgacgctgccgtcgatctggaagacgatcgactttcgcctggtctggccgttcgtcatctgcggcctcgccggcgtgccgatcggcattttgctgatcgcccgcgccgaccccgacgtcttcaagctgacgatcggcgtcttcctgctggtgtttccgaccttgctgttcctgcaacgcaagccgatgtcgatttcgtttggcggcacatgggccgacggcgcgatcggatttgccggcggcatcctcggcggcctcgccggattgtccggcccgctgccgatcctgtgggcgagcgtgcgcggctggggcaagcagcagcgccgcggcgtgttccagatcttcaacttcacgatcctcgccgccgcgctgctgatccagatcgcaagcgggctggtgacgacggaactgatctggctgacggcctgcgcatttccgggaacgctgctcggcgcctggctcggctcgcggctctatcacgcgctcagcgaccgcaatttctccgacgtcgtgctggtgctgctgttcctgtccggcgtggcgctggtgtggaacgggctggcgccgcgataatcagccgccgtcgcagattggctgagccggtcatccgaccggctcgagaccagcgcgctccggagtggcttcccgcgccggcggcgcgagacgcttgctgagttcgcgacgcagcaaccacaagctcagaccggcctgcagccacgtcgacacgatcgacaggtaccacacgtgctcgatccggaagccggcacgcgtcgagagccagatcaccggcaccgcataggcgaagaggcgcacgaacgagctcagcagcaccgggcgggtgttgccgaggccctggaacatgctgttgcaggtaaagaccagcccctgcgccaccagattcatggacacgaagtgcaggaactgggcggcgaccgccatggtctcgcgatcgttcgagaagccgtcgagcaacagccccggcttccactgcgcgaggatcgtgatcgcgatcatgacgacggtgccgatcgacaccgccttgatgaaggtctcccgcacgcgcccggcattgcctgcgccgaaattctgaccggcgatcgggccggcagcgagcgcgaccgccaatgccggcatctggatcagaccgagcacgcgcgtcccgatgccgaagccggcctgggccgccgggccgaaatcgcgcagcacgtaatagatcacgcccatccaggcaaagatcagcgcgaactcgccgccggcaggcaggccgacattgaagatgcgcgtccactggcggagttgcgggcgccactgcgcgggatcgaacccgacatagcgctccagcttgcggaaatacgcgaacaacatcagcacgccgatgaggacggcgatcgaacttgccagaccagccccggcaacgccgaacgcatgaccggtgccccagcccgcgatcagcaccggcgccagcgcgatgttgatgatgaccgcgaccgcctgcaccagcatgctgggccgcacgatgccggtcgcccgcagcgctgacgccatcacctgaatgaggaactgcagcgccagcgccggcatgaaccacagcagataggtggtgcccgcgtcaacggtggcctggtcggccgcgaccgcgcgcatgtaagggcgcgacagcacgacgcccgcgaccagcgtcaacagcccgcacagcaccgacagcacgatcgactgattgaacacaagattggcatcggcgcgatcggtgcggcccacggcatgcgcgatcagtgcgacggtgccgacgcccagcacttgcatcagcgcgttgacgagaaaacccgcattgccggctgccgccacgcccgccacggcggcatcgccgagacccgcgacaaaatagaggtcgaccaattgacagatcatgatcgtgatcatgccaaccacgatcggaggcgccatggtcaatatgtggctcacgatggagcctcgcgtgaggtctttcattacaattccaatctcaaatcgattctcgtatcaattccggcgcgtggctgaagaacatgagcccatcagccacgcgcccttgcatcattccgccgcgacctcgccgaactcggtcgcctggcgctcgaacaggccgcggtagatgccgcccggccgcgcggcaagcacctcgtgcgtgccctgctcgacgatctggccgcgatcgaacaccaggatgcgatccatgctgcgcaccgtcgacagccggtgtgcgatcacgatcgaggtccggcccttcatcagccgctccatcgcctgctggatcagcgcctcggactccgaatccaggctcgaggtcgcctcgtccaggatcaggatcggcgcatccgccaggaaggcgcgcgccagcgccacgcgctgccgctcgccgcccgacagcttgacgccgcgctcgcccaccagcgtgccgtaatccttcggcagccgcatgatgaagtcgtgcgcattggcaagccgcgccgcctgctcgatcgccgccatgctggcgcccggccggccataggcgatgttctccgccagcgtgcgatggaacaggatcggctcctgctgcacgatcgcaatctgactgcgcagcgattgctgcgtcgccttggcgatgtcctgaccgtcgatcaggatctttccgccggagacgtcgtacagccgctgcaccagcttgacgaaggtcgtcttgccggagccggagcgcccgaccagaccgacgcgctcgccggcatcgatgtcgaccgacagcccgtcatagagcggccggcgatggccgccatagtggaacgtgacgtcgtcgaacacgatgcggccgccctggatgtcgatcgtcccggcatcgtcagcatcgacgatgccgagcggctcgccatggatctgcaccagctcctccatgtcgttcaccgaacgctgcaggttgttgatgtgcatgccgacatcccgcaggtaggcgtggatgatgtagtagctggtcagcacataggtgacgtcacccggcgtggcgtggccttgcgcccacagcaggattgcgccgccgatcaccgacgcgcggaagcacagcagcaccacgagctgcgccgtcgaggtgtggttgtagcggaaccaggtccgccgcacccgccggcgccagcggctgatgacgccgtcgagcctgccatcctcgcgcgcctcggcgccgaacgacttcaccaccgcgttgcaggtcaaggcgtcggccaacgtgccgccgaccttggtgtcccaggcattggagacgcgcgcggccggcgcgacgtaatacacctggaacagcatggtcatcgcgacatagatcaccgaaccgaccgcgatcaccgcgccgagctgcggccaatgcatgccgagcaggatcatcgagccgaccagcacgatgagcgacggcagcaacgccatcaggatggtgtcgttcaacagatcgagcgcccacatgccgcgtgtgatcttgcgcacggtggagcccgcgaacgaattggcgtgccagtcggtcagcagcgacagcgcgccgaggccgacgatggcgccgaacgccagcatcgccgcatggcgcgccatcgcatcggtggcgcccgcggtcagcgcgtcgaccagatggcctgaaaataccggcatgaacaggtcggcagcggtcgcgccgaggaagcccgcggtcacggcggaggcgcggaacggctgttccagccaatggcggaacacgaatggcagcacgatccggatcgccgccggtcgcttggtcgtttgagtggtcatggtccattccggccacgcttttgcagcgcaagccggctccatctggggcaacgcgcggacagaatccggccgcaggcgtcgctgaaaacaatcggtaatgtgttgggaagtttggatgatcgggcatcgagcccgatcagcgccgggacctaatgcgcgagagcgcccagcagcaacgaacgcgggcgcacggtctgcgaaacaaacgacatcatgtgcatctccccggttcgtgaaacgatggcgctgcttataaatgcatcatgcgcgattggcaagatgacatccgcgtgagtgcgtcaatgtgtcgacgatgtcggctattcacgccaacgggtgcacgccgcgatccactcaatgcgcgtcgccgccgccggcggccatcgacggcggcttgttgacgaacagcaccaggaggctgagcgcgacgtagaacagcgacagcatgaagaaggcgtcgccataacccatcaccgcggcctggcggtgcacgagctgcgagagctgcttcatcgccatcaaggtggagtcgcccatgccctgcaggcgctgggcgaagttgttgagggtctccaccgccatcgtattgccccaggtcacgcgatcctgcagccgcgagatgtgcagatcggtacgatcgttgagcacctcgttgatgacggcgagcccgaccgcgccgccgaggttgcgcatcaggttgaacaggcccgacgcattcttgacgcggtccggctgcagcgtcgcgagcgcgatgttgttggtcggcaccatcgcgcacatcatgccgatgccgcgcaggatctgcggcagcagcagctcgtagaaatcgtactcgcgggtaatccaggtcatctgccaggagccgagcgcgaaggtgacgaggccgaaagcgatgatgtagcgcaggtcgaccttctgcatcagccggccgaccaccggcgccatgaagaacatggtcatgccggagatgaacatggtctcgccgatcatcagcgcgctgtagccgcggatctcggcgagatagcgcggatagacgtaggtgaggccgtagagcccgacaccgatgcagaactgcagcacgcagccgaccgcgaagttgcggttggagaaggcgtagagatcgacgatcggctcctccgcggtcagcacccgccagaagaaggcgatcgccgagacgaagcagatcgcggcgcagatcgccaccgaggtgtcctgcagccattcatattgcgggccttcctccagcacatattcgagcgagccgaggaagccgcccatgaagatcaggccccaccagtcgaagcggtcgagcagcgcgaagttgggctgatcgaaatcgaccaacgccagcacgccgacggtgatgatgacaccgggcacgatgttgatgaagaacagccagtgccacgacatcaggtcggtgatgtagccgccgacggtcgggcccacggtcggcgccagcgtcgcgaccagcccgatgaccggcgccacgatatagaacttggagcgcgggaagatggtgtaggcggaggcgaacaccgtcgggatcatgccggcgccgaggaagccctgcagcgcgcgccacaggatcatctgctcgatcgaggaggcaaagccgcacagcaggctcgatgccgtgaagccgaacgccgagattgcaaacagcagccgggtgccgagcgcgcgcgacaggaagccggacagcgggatcgcgatcacctccgcgatcagataggcggtctgcacccacgacacttcggtcgacgacgccgacaggccggcctggatctcggtgagcgaggccgagacgacctggatgtccaggatcgccatgaacataccgaacaccatgatgatgaaggcaaacagccgctttggctggatgcgctcggaatccgaagcgccggtcatcatcgagggcgaggcagtggtcgcgtcggccatgggctcatcaggctccgagcctcggactgcgtccgaagcgtcaaggcatcattgcggatggatcatcatcggcgagtcgaggtcggtatcggcgtcggcatcggccgcgccctcgctggtgtcgaccgtggtgtagaccgacatgccggcgcgcagcaggccctgtttggcgacgctgtcaggcacgcggatgcggaccggcaggcgctgcacgatcttggtgaaattgccggtcgcgttgtcgggcggcagcagggtgaacaccgagcccgccgccggcgagatgctgtcgacgatgccggtgaacttgcggaagccgtaggcgtcgaccttgatcgtcacccgctgtccggtgcggatgcgcttgagctgggtctccttgtagttggcgtcgatgaagacgccggcgagcggcaccacattgccgagccgctgcccgacattgatgtaatcgccggtgttgaccaaccggttggagaaggtgccgtcgaccggcgcgcgcaccttggtgaattcgagatcgcgctcggccttggcgagctgggtctgcaattcggcgagctgggcgcgggcctcggcctgctgcgccttggtgacatcgacgttgctctttgcggcgtcgtaggcagcctgcgccgaccgcaccgcggccgcgccttgatcacggcccgcttcggagacttcgaaggtggcgcgcgaggcaaagcccttggtgctcagcgcctgctggcgatcgtaatcgagatcggcgcgcttcaaaccggcctgggcggagacgagctgcgcctgcgcctgctcgaccgagctttcggccgccgcgacctggcgaccgatgcgctcgatcgttgcctgctgggtcgcgatccgcgtgcgcgcggcatcgaccgcgatgcgatagtcgccgtcatcgatccggaagatcacatcgccggcccgcaccagcgcattgtcgccgggcaggatcgccgcgatatggcccgcgacgcgcgcgccgagcatggtgttgttggcgcggacataggcatcgtcggtcgagatgtagaagcgcccgaccatcaggtaataggcggcatagcttgcggcggcgagcgcgagcaggccgacaatgcccatcaacacgaatcggcgcttgccggatttcggcgcagcggtggcgggcgaagccgccggctgctcgggcgcagcagcgggtggcgcttcagccgggctcttggcttcgtcggccctcgcctgctcgccgagatcggccgatgcgtcgcgcgccatcgcgtccccggccatctcaggctcggaacgaacaatgcgtgcagcctgatctcgtgctgcggccataaccgaggctccccacaaaaaatcttgaggcccgcgatggcggaatacgggccgtgcggcgcatcgccactccttccaataccattgaccgaacggttcggtcaatctatattcctacccggcggtttataatggttcgattgtcccgttggttcattccgggttgagttctttcgcgagaagctaaatcaatggttgcagccccccgaacctcgctccaagccgtcggcgaggaggaatcttcgaaacgccgccagatcctggacggcgcccgcaaggtattcctggagctcggcttcgacggtgccagcatgggcgagatcgcccgcgccgccgccgtctccaagggcacgctctacgtgtacttccccgacaaggccgggctgttcgcggcgatcgtcgaggaggaaaagctcgaacagggcaaggtctccttcaacttcgacccggcgcgcgacgtcgacaccaccctccccgagttcggccgcgcctatatcgccttgctgtgccggcccggcggcggctcggcgatccgcaccgtgatggcgatcgccgagcggatgcccgagctcggcagccggttctacacccatgtgatcgcccacaccgtcgaccgcttcgccgcctatctggaggcgcgcgccgcgctcggcgaactcgtgatggacgacacccagctcgcggcctggcagttcatgcagatgtgccaggcgacgctgttccaggcattcatcttccaggccaatccgtcgccctcaccggagcggatcgcgaccgtcgtcgacagcgcgacgcgcgtgttcttcgcagcgtaccggccgaagcaagcgaactgatctcttcgtcattgcgagccaacgggtcgtgcgaacgcgcgcccgatggctcgcaatgacggggacctaaaggcgcgctaccatggccgagcccgacgccaattcgaggtgatcatctgccatgaacgacctcaccatccgaaacatgcggcctgacgagatcgcactggcggtcgactgggccgcggcggagggatggaatcccggtctcgcggatgcgccctgctttgccgccgaagacccgcagggcttcttcatcggcgagctcgacggcgagccagcggccgtgatctcctgtgtcaattacggcgcgcagtttgcctttctcggcttctacatcgtgcgcccggatctgcgcggccgcggccatggcctgaagatctggaatgcggccatcgcgcatgcgcgtccgcgcgtgatcgggctcgacggcgtggtggcgcagcaggcgaactaccagaagtcaggcttcgcgctggcttacgccaatgtgcgctacggcggcacggttgccgcaccgtcggcagcaaaccccaacatcgtcgcgctcaccgatttgcccctggcgcagatcgaggccgacgacgccacggtgtttccggccccgcgcccggccttcctgcgcgcctggatcaacaattcgggacatgtcgggcgcgcgttgatacgcgacggcaggctcgccggctggggcgtgatccgtccgtgccggagcggccacaaaattggtccgcttgtcgccgacaatcgcgccggcgccgaaagcattctctccgcattgctcgcgagcgcgggcggcggcgagatattcctcgatgtccccgcgatcaatcgtgatgccgttgcgctcgcgcaaggccttgggctgtcaccggtgttcgagactgcgcggatgtacaccggcgcgattcctcccttgcggatcgaccgcgtgttcggcgtcacgactttcgagctcggctagcgccgcctgtgcgttcaaatgacgcaggatcgcaaacacggttcctgtgaagccgctcataacgcggttattcgacaacgcaatatacttctggttgagcgaaggagccagcccggcgcacttccgcgcactgtgctcgtccgcaaggaggtgtcatatggcgttcctgttcttcaatttccgcagcatgagcctcagcgaggcgctcgccaatgtcggcgaactcaagggcgtcgtcgccaacacgctgaagcagagcggcttcaccgacgtcgtcaacacccagtcggaggtcgccggcaacaagaacggcgttcgcgtgtccatcctgcatctgcacaatgtcgatcggcagttctggcaggtgttcatggccggcggcgataccgcggctaccaagcagacgctcgacgacgtcgtcaacaaggtggagcacctcgccttcctgtagggctcccggctctgattgaagcaagacgtgcgaaatccccgcgggtcaaccgcggggatttgcgttccctaaagcgcgatgagattgggttgaatcgtcatcgcgctttagctccttgtttgagcatgatcttttcggaaaaccgcttcgcacttttccggatcatgctctaattcgccgccgcgttgacttgcggcgtggcgacgttgtcctgctccacctcctccggcagtccggcgaagcggcgcagcgccttcgccatcttcacgcggccggcgacgccggtgatgatgacgtcgaccatcacgaacgacgagtggaagtggccgttgcccttgagttgctcgaccttgacgccggctttcgcgagcgcgtcgccataggcattgccctcgtcgcgcagcgggtcgaactccgccgtcgcaatgaatgccgggggcaggccttcgagcttgccgcgcagcggcgcgacgcgcggatcggtgcggtcggccggagagcagtacaggtcccagaaccagaacatcagcccccgagtcaggaaatatccggctgcgttgtcgacataggactggcggtcgaaggtcgagtcggtgaccgggcagatcaacagctggcctgagatctcgggtccgccgcgatcgcgcgcgagctggcaggtaacggccgcgatgttgccgccggcgctccagcccgcgaccagcaccggcccgggcctgccgccgagctcgtcggcgtgggcggcgatccagcgcgtcgccgcatagccgtcctcggccgcggccgggaagcgatgctcgggtgcgtggcgatagccgacgctgacgatgatcatgccggtgcgccggcacagatcgcggcagaacggatcatccgacagctcgtcgccgagcacccagccgccgccgtggaagtacaccacgatcggatgcggcccggccgtcgccggccggtacagcttgtaaggcagcggcccgtccgcgccctgcagcatgccggtgccgacctcgccgaccggtcgtcctgcaggacggcccttgttgaactcggtgaggaaatcgcgcgcgccctgcgcgcccatcgtctcgatcggcggcaggttcatctccgccagcatgccgagcacaagccgcacgtccggctgcaaccgcaccacctcgccgtcattgcactgctcggcaacgccgggaccggtgagcctgaagccgagcatgccgcggccgaccacctcgttgcagatgctgcgatacgggccgacgccgccggtatagggcatcacgccctgcggcttgccgggcacgttggcgcccgtgtaccaggtgttggcgagccggtgcagcgtcagcgtcgcgcagtcggccatgtggcgttcccagccggcctgcgcggtgtcggtcgcctccatcgtagtgaagccggcgtcgcgcagcgcggcgatgcgttcgaccacccagtcgacatgctgctcgatcgagaccgccatgttcgacagcaccgatgggctgccggggccggtgatcatgaacagattggggaagcccgcgacggtgacgccgagataggtctgcggtccgtgcgcccagacgtccgacagcgacttgccgccgcggccggagatcggatgcaccgccatgatcgcgccggtcatcgcgtcgaaaccggtggcgaagacgatgacatcgacatcgaagctgcgcttgtcggtcgagatgccgctcgccgtgatcgccttgatcggctcctggcgcaaattgaccagcgtgacgttcgggcgattgtaggtcgcatagtaattggtatcgaggcagggacgcttggcgccgaacggatgatcgtgcggggccagcgcggcggcgatctccggatccttgaccacggcaccgatcttctcgcggatcagatcggcgaccaccttgttgccgtcgacatcgaccgcctggtcggcccagagctggctcaagatgtggacgaggtcacccgccgcccacgccttctcgaaccgctcacggcgctcggcgtcgctcaattgccagctcaccacggtctgctgcggatagggcacgccggccatcgaccagcgcgcctgctcgcggtaggctgcgcgatcgctctcgaagaacgccttgcgatcatccggcaccggaccgttgccggcaggcaatgcgaaattcggcgtgcgctggaacacggtgagttgcgcggcctgctcggcgatcagagggatcgactggatgcccgacgatccggtgccgatcacggcgacgcgcttgcccttgagatcgacgccctgatgcggccagcggccggtgaagtagatctcgcccttgaaatctttgacgccgtcgatctccggcggcttcggcgacgacaggcagccggtcgccatgatgtagtagcggcacgagacattggcgccgttattggtcgagatcagccagcgcgacgtcgcatcatcccaggtcgcctgcgtcaccttggtgccgaacctgatatcgcgacgcaggtcgtagcggtcggcaacgaagccgagatagcgcaggatctccggctgggtggcgtatttctccgaccaggtccacgctcgatcgagctcgggatcgaaggtgtagctgtagtcgatggtctggatgtcgcagcgcgcgcctggataccggttccagtaccaggtgccgccgacgtcgccgccttcttcaagcgccaccgccgagaagcccgccttgcgcaagcggtgcagcagatagagaccggcgaaaccggcgccgaccaccgcgacgtcgacttgctgcgtggttccgctgtgggtggagtccgaagcgcgtgctgcaactgctgcgtctggcatgccattcctcccgtatgttttgatttgacggaaggctagccctgccctttcagtttgtcatcacgacaaacgcaatctgaggtcgccgcaattgtgacgcccgcggcctgtagcaggatgcgcagcgtgtggacgcaagtggcgacgaaggatgtggggagcgcaataaacggcgtcacacactacaacgtcgtcccggcgaaagccgggacccatactccgtcgcggatgttgtgggcgagacgcgtcgttccaccggcgcgcaacaatgaccatcggtggttatggatcccggccttcgccggcacgacaccgaatattcagtgccggtcgtgatcaaaaactcacttgctctagatgacgggttgggcacacgccctcagatcgaccgcatcagaccgccatcgacgcggatgttctggccggtgatgtagccggcgccgtcggagacgaggaaggcgatggttgccgcgatctcctccgccttgccgtagcgcttcatcggcacggcgtcgcgccgctcctcggtcgccggcaggctgtcgatccagcccggcagcacattgttcatgcggacattgctggcggcgtagctgtcggtgaacagctttgtgaacgcggcgagcccggcgcggaacaccgctgacgtcggaaacatcgcgctcggctcgaaggcccaggcggtggagatgttgacgatcgcgccggacttctgcgcctgcatgtgaggtgcgaccaggcgcgtcggacggatcacgttcatcagatagacgtcgaggccggtgtgccactgctcatcggtcagttcgagcacgccggcgcgcgggccgtgaccggcgctgttgaccagcgcatcgatgcggccccagcgcgccatcacgccgtcgacggcgcgcttcaggtcgtcgttcgagcggttcgagccggtgaagccgaggccaccgagttcactcgccagcgcctcgcccttgccggacgacgacaggatcgcgacgcgaaagccatccgcagccaaacgccgcgccgccgctgcgcccatgccgctgccgcccgcggtgacgagtgcgaccttctccaaagccatgatctgatttcccatttgatgacgaagttgacgcaaggtctatcatctgggatcaggcagcgcgacacccggcctgccgcacgatggcgcactacttcctgaacacctgtttcgatccggcgtcgaacctggccaccggccggtccatctgccacagctcgatgtcgtgggcgtcgacgagacggccggccgacgtgatggcctggtcgtcgtcggcgcaatccatgttgaccacgccgatggatcggctgtgttgcccaacgatatatgcgcgataggtcgtcatcttcgttctccggccgttgcgaactccgccgcagcgatgcccgagcgcgaagatgagcttgaggatgtatgaattcgagaaggtctgcttcgacttcttataagcgcggaataagtagcggccgcgtcacgggccgatcgaatcagccgtcaggccggcgcgccgttcttgagcagcttcgcgatggccgcaaccagctcatcgggcgagaacggcttgttcagcagcacgctgtccggcacgcccctggtcggccactcgtcgccgccaccgccggtgatgtagagcaccgggaacgatggatcgatctcgcgggcaccacgcgcgacacgccagccgtcgagccggccgagcaggcggatgtcggtaaccagcgcgctgtacttggtgcggaatgccttcagcaacgtcaacgcttcctcgcccgagcctgcgatcgccggctcgtagccgccgtccttcagggcgtcttccaccatcatctgaagatcacgatcgtcttcgatgacgagaatgatcggagcgtcttgcaaagctatcccccagaaatcagccgggcgcgctcccggctccgaagcatatgcagcataaaagtggccaccgtttgcacggtgtcacccagtaaaaatacgggtatcagacgcgtgtctattcgtcggcgaattcgtcttcttcgttgacccccgctctaccccgcggagccggctttctgccgccaagcgatcctgtgacataaggttcgcgcgttgcataggggttacggccgccggcgcgcgccgcgacctcttcgccggagaccgcggcgggctggcagatcaggcgccggctggcccggcgcatcaggtccacatggatgtggtcgtagtgatagacgttggaacccggtgccagcacggtggtgaattgctggcaggcggcggcctggacatcgcgcaggaagccctgctcttccggcaggcccttccagccatccttcaccgagacgcggcggccatcggacagcgtgaaggctgcgatgtcgagcgcattgccgaaggcgtgctcagaaatatgcgcgtgcgaattgccgttcatgccgcggcacgaataggccgagatctgcttgatctcgacgacgcgcgcgccgaaccagcgctgcgccgccggctgcacggaatcggcgagccagcgctcgagcacggagacgatcgggcacgccagtgtcgccgccggcttcactgcgaccgggccgaccgtcatcaccggattgccgttcgacggaccgagccgcggcggcgatggcgcgccgggcggctgctgcgaataaggcgccggtgaatacggcgcggctgcgccctcgcgctgcggattgcgcggcaggcctggataataaggtcgctcgccgcttgcctcgggcgacccgtccggcggcaggtcgatctcgccctgctgcggcggcacgccgggcgccgacaacgagaccggcccgttcggctggctgccatagttcggctggccgacggcctgatcggaatatggcgcctgcgcgggccccggactgggctgacggttgatcggccagcgcggctggccaccgaccgatgccggcggacgcagactgtcatcggcaaatccataggctgaactggtttcgccgagggctgcgaccttgagcgggaattcggcgccgcagacgccggggccggaaatcggatcgatgcggacgaggtcgggcccttccttgaccgcacctgatttcaggcaagcggcctcggcctcggcccgccacggttcgcgctcggcggtctggaacagaccacggccgcaaccagcaagcgacacaaggacaagggagccgacgagatacaaacgaactccacgcgtcatggcgcggaggttctgcgaatttgattaaagactcttcaacgcatttcgactgaatgatttcagctgcttttaaccatgcgcggcttgcggcgtaatgcttgttgcgtcaaccactgacacgcgctctgcatcacgacgtagaagcgcaaggagatcgccgctcgtgtcgcgatggagaatgccttggcattcagcatccgtgtccggcgcaggaaattcatctataggtagcagttcctgccacaacaacccggatcgggaactgacaggcggtatccggtactgctggcgcatacgttctgcgcaacgccctggaaaatatttggtgccgcttcaacgccttgattcggcatccgtttgaaccgcacatcgcaatgcggcatcgctcggaaactccggccggacagcaccgctgactttatccgccaggaaccacttgctagcttttgcgttaatgcgggcagcgttgtgaaccaagggagtttcccaatggatttcgcgagtcctctgctgagcaagctgagcattgtggccgcgtacatcgcgttcgccttcgttggcgccatcattctcggcgtgttctagacaatcagacaggcgatgagttcagcgcccggcggccgtccccccgccgggcgctttgcgtcaccgatgaaggcatccggttacaaatttggacagctgcgcactcaggtgcgcggctcaccccggagctgcccctgcgtgatcacccgcgcccgcgaatgccagacgcggacccagtcgacgccgctgcaatagaagcggccgagcacgcaggattcgacgcgcagtttgtccgcgccctgcaccgcgatcgtgccgtaacggatgatgccgctgtcctggctgtagacaccgcccttccagcgcgcatcctgcttcggcttcatgttgatcagcaccgcttcgccgagatcgcgcgtggacctgtcgagcgcgtagccgcacagcgcgttgccgcagaggcgaatgcggaccaggtcgttggcttcggtctgccagtcgccgatcgggccgtcgtccggctcgtcgacctcgcgcgagactcggatcagcggcggcaccggacccgcaggcacggcggccggcggcggagctgcgacggccggcggcggctcgggcgtcatcacgcgcgtcggcgccggcggtggtggcgcggcaacaggcggcggcacggcgggagcgggcttgtacacaatgatcggcggcggtgctggcggcgggcttgcggccggcgtaaccgggatcgctgcgggcgcgggcaccggattcaacatgcgaccgttgtcgccaccatcgtcgcgcctggatctgtcagacaccgagacgcaggagagcgagcgacaccgcgccgaatcgagatggacgcggtggccgccgatcgaaaacgagagcccctcgccggcataggcgaacggcgcgaacagggtcagcgcgacgagcaggcaggtgcgcttcatcgaagcctccagaacatccgacgacgcttagggatgcggtgctcacggcgcagtgacttgcatcaccatggcaatttctccccgccgcggcgcgccttcggctgcgtccgccggcgtgatgtggatcacagaacctggccgcgcggccgcgtagcgtccggaccaatcgatccaccccgccccacgccacggagacccagatgaagaagctcgttgcgatcgccgcgctgctgatggccaccacatcggcgcatgccggcggcaccggcataaccttcgagatcgacggccagcgcgtgcatgtcgaggcgccgcgcaattgcagcgcgctgtcctgcatccgcatctcggcgccgggctatagcggcacgatcggcggcatcagcaagaacttcggctcgaagtccgatgatgctgaggacgtcgccgcgacgagctcgccgccaccggcgcccacccccgcgccggctcaggtcgcagcgccgcagccggccgcgccggtcgccgccgcgg

SEQ ID NO: 17 - DNA, 155300 bp, Bradyrhizobium enterica
acgtcctcggcgaggatcagcagcggacggccggactgcaccacggcttccagcaccggcagcatcgactgcaggccggacagcttcttctcgtgcagcaggatgtaggcatcctcgagctcggcggtcatcttctcggcgttggtgatgaagtagggcgagagatagccgcggtcgaacttcatgccctcgacgatgtcgacctcggtctcgagcgacttgttctcctcgacggtgatgacgccctcattgccgaccttctgcatcgcctgcgcgatcatcttgccgatcgcggcgtcgccattggccgagatggtgccgacctgggcgacttccgacgaggatgcgaccggcttggcgcgcttctcgatgtccttgatcacggcggcgaccgcggtgtcgatgccgcgcttgaggtccatcgggttcatgccggcggcaaccgacttggcgccctcgcgaacgatggcctgggccagcacggtcgcggtggtggtgccgtcaccggcggtgtcgttggtcttggaagcgacctcgcgcagcatctgcgcgcccatgttctcgaacttgtcgtcgagctcgatctccttggcgacggtgacgccgtccttggtgatgcggggagcgccgaacgacttctcgatgacgacgttgcggcccttcgggccgagcgtcaccttcacggcgttggcgagcacgtcgacaccgcgcagcatgcggtcgcgggcgtctccggcgaattttacgtccttggcagccattgatttgaactcctgattgaatgaatgtcgttgtttgccgcttgatcgccgtgtccacttcccctctccccttgtgggagagggtggacgcgatgcgaagcatcgcggacgggtgaggggtctgtctccgcggatagagacccctcatccggcgcgccttgcgcgccaccttctcccacaaggggagaagggaagaggtcgccgtgcagaagcagcggccctcggagttcgtgggcttacgccagcacgcccatgatgtcggactccttcatgatcaggagctcctggttgtcgagcttgacctcggtgcccgaccacttgccgaacagcacgcggtcgccgaccttgaggtcgatcgggatcagcttgccggcttcgtcacggccgcccgggccgacggcgacgatctcgccctgcgacggcttctccttggccgagtccggaatgatgatgccgcccttggacttctcctcggcatcgatgcgcttgaccacgacgcggtcatgcagtgggcggaaggtggatttagccatgacgttccctcttaaaggtcctcttggaggcttggtttcaggtccggttcatcgagaccggtgttgaatgccggcccggtcggcgccaggcaggacgcccgacgcatttagcaatcgtggtgcaagagtgctaattgtgggccgggaaatatggcttggcgcagtttctgtcaagcaaacgggttaaggccttggtgaggccaatataggatggtggaccggaaaccaaatcgtagcgatgacgtaattttgtcagacgtcattgctccgtcttaagttttacgcttggctgcatgacgggtgcggccgggacatagtcgggggatacatatgatcatgtcactcaacgcgcgattggtcgcacggttcgcggctgtttcggcgctgacgacactcttgggagcgtgcggcagcatgagcctgccgtcgctgtcgtcgaaccccgagccggcgccttctgaaccgggagtcgccccggaaatgcccgcgtcgatccgccccgacgagatcgtcggccgctggggtctcgcctcgttccagaatcccgccgaccgtgcccgcaccgaggccgccgcgcgcggccagtgcaagcagccttacgtgatcggcgccggccagagcggcggcgtcatcatgcatctggccgaccaggctaccccgcaggaattgcggctgaagggttccccgagcggcaagaactatatcggcccgcccggaccggtgcccggcgagcaggaccgcgagatcatctcgttcgacggcagggtcctgatcacccgcttcgtcgacaaggacgccgccacccgctacggcaacatggtctacgtccgctgcgcgccaagggcgtaagagcgaggctggtccttccgttcatcctggagccgcatcggcagtacacgtctccccttgtgggagaggtcgaattgcatcgcagatgcaattcgggtgaggggtctctctccgcgagtgaccctctcgcattccaagttcgcggatagaacccctcatccggcgcggattgcatccgcgccaccttctcccacaaggggagaagggaagcggacaagtccaagcaaacaaaaacgccggcccttgaggccggcgttcttcgtaatgatctgccgatctcagttgaacatcgcgtcgatgtcgtcctgcgaggcgtggccggcgtcgccgtcgagcttcgggccgttgagcaagcgggcatcgccctcgcgggtgtcgacgatcggcggggagtggctcttgatcgcgtcgacgccgccccagatgttcatcatctcgttgatgtgctgctcgatgaacttcatcgtctgcatcaccttgctgatgcgctggccggtgaggtcctggaagttgcaggcctcgaagatagagaccacgcgctcctggatatcttcgctgagccgcttctgctggtcgggcgtgacgttgttggcgagcgcggtcgcggcctggtcgatcgcctcgaccgcttcgaggatctgctgggtggcctgttcggtgccgccgaccacggcgccgagctcgccattgaccttggccatctcctcgccgttgaagctcttgccgtgcagcacggcgatctcgcgcttggtgcggctgatcgcgtcgtggatcaggtcgagctcgaccttgagcttctcgcactgttcgacctgcgcgcggtaggtctcgagcagcgcgtgcgcttcggcgacctcgcgggccacgatggaatcgacgctgtcggcggtgcgctgggccggtgctgcggccatctgggcgcggatcgagcgaagctcggccatgatctcgcgatgcatcggaccgaggtcggcgccgccggtcacttccggctccggcatcacaacctcgcccatcgcctgctcgacacgaaaacgcttgcgcttcactgacatgattttcattcccgccccttcactgcagtccgttctagacagcgcggatttaacgtcaggttcacgcgggaacagtttgcgctgatcctgcgcaacctcagggatactgccgattaaccatgacgctgcggcgttcacgcaaaataaacgctacccggcaaaaccgcgccgcattgtcgacgtggtgaatcgaaacggccgatccgtttaccaaaccgatgcggttttcattgcttattgaccacgtgcaacggcgcatcacgcgccctcgcgcatcacgtcacgacgaaaccagtacagagtacgtcgatgttcaggaaaaccacgcttgcgctgcttgccggcgcctcttcgcttattgccgttccccatcatgccatggcgatcgacgcgtcggctccgcccgagcccaccgtgatctacgccaaccggggcgcgccgcagccgccgatgcgcaccgcctatgtgcagccgcaacgctccaacatgggcggcggcttcatcgaattcctgttcggcgatgcgccatcgtcgcagggttatgcaccgcagccgatgtatcagcagcagccggcctattacggcaatccccaggggctgccgccgatggatccgcagcagcagatgatccgccagcagcaagaggcggcgggcgatccgacgcagcgtccgttcgatccgcgctatgaaaagcagctggtcgattacagcggcaaggaaggcgtcggcaccatcgtcgtcgatacgccgaacaagttcctctatctggtgcagggcgacggccgcgcgctgcgctacggcatcggcgtcggacggcccggcttcacctgggccggcgtcaagacgatctccgcgaagaaggagtggccggcctggacgccgccgccggaaatgctggcgcgccgtcccgatctgccgcgccacatggaaggcggcccggagaatccgctcggggcgcgcgcgatgtatctcggctcgtcgctctatcgcatccacggctccaacgagccctggacgatcggcaccaacgtctcgtccggctgcatccggatgcgcaacgaggacgtgatcgatctctacggtcgcgtcaatgtcggcgccaaggtcgtcgtgatgtaatcgcgtaacccagcgcgaagtagagcgctgggttacgaagtccgcgtcgtcccggcgtagggcgggacccatccccacctgtcatcgcccggcttgatgttcagcccgggcgatccagtacgccgtggcctctcggctcaagcactgcggtctccgggatactggatcatccgcctgcgcgggtgatgacaccgcgtggttgagtccgaatcaaaaacggccgctcgatgagagcggccgtttgtcgttcaggcgatgcgcacgcgtttacgcgtaatcgctgttgtcgtcgccgccattgtcgtcgaagtcgtcggcgtcttgatcatcgtcgctgtcccggtcgacctgcgcctggtcgaacgcgccggcgcgcgagccgtaatcactgtcgcgaccggacgaaccgacatcgttgatcccggcgtcacgcgcgaggtcgctcgacgactggtcgccgccccacgggcgcgagccgccaccgaaattgccggcatcggccagcgactggtgaccgccgccgcccatcatgccgcggatgctggagagcagcagtccgccgccgaccacgccggccgcggccgcagccgctgtgccgaggaatgatccgccaccaccgccgggcgcgccgccgccgaaggccgggggctgcgggccgccgtaaggctggccgtattggggctgattgtattgctgcggcggctggccatagccaccacccgcctgctggatcgcctggcccgagttccagaccgggcggctgccgccgatatcgggcgcgcgcaccggcggcaccgagccgtgcggctggccttgtccctgtccgaagatggcatcgcgcatcgaatcgaggaaaccaccttgctgctgcgccggctgctgctggccgaccgcggcctcgagttcctggatccggtcatgggcgcgcttcagcgcctcgtcctgcaccagtgcggtctgcaccagcgcgtagaccgcattcggcgcgctgcgcaggccctgcatgatcgcggacatggcctcgctgtcgcgcggggcattctccagcttggcgagccggtcgaagagatcgtcgatcaattggcgttcttgcggtgtcatggcgttctccatcgcgtcgatcgaatcggcgcgcggctgatgtaggacgggctttgtggcgcaaggagtgggggccagaattaaatttatgtatgcgacaatccgaccgggtgaatttcgtgaaccttatcaggccagtgtaactttattcagggccagcagcgcgacgaaatcatcgcccgagagatagccatgttcggtctcgcgctgcgtcgtcagcgggtcgaggccctcaagtgtttcgtcgacgaaaccgggatggcacatcaccagcccgtcctcgggcatgccgtcaagaaagccgcgcatcagtgccgcgaaatcattctcgcgcgtaaaatcataggcgccggcgaaggctggattgaagcgcaggccggctcgctgcgccttgatccggaattgggtgctgagcacgttcagcaccagcgccttcggcgccgtcagctgccgcgccagcgggccttcgcgtccgcactgccgcacccaggcgtccggcgcgcgttcctttacggcgcgcaggaagccgtcgcgcacctgcgggaaaagctgcgcgtgctggtgaccgtcgacgaaatcaggcgcgcggccgaacaggtcgtggaacgcgtcgagctgcgccagcacttcggcgtggaccaattcggcatcgagccggtgcatcagcccggcgcgcaacaacctcggaaagggcaggaacatatcgccgtcgagcgggcggaaatgcatcgtcagcggccggaacggcgcggtcagcgtgacgtgcagtccgatcgcgcagcgcgggcttttcgccaccgacgcctgcagcgcggccgccgcctcgcggccgatcgccggcgtcaccatcatcaccgaggtggcattgagccggccgcgctcgatcaggtcgcggatcgcgcggttgacgccgtcactcaagccataatcgtcagcacacagccagatccggcgcggcgcggtttcgctcattcggcggcggtccgctcggtggcgctttgcgcagcgccgccgtcggcgtgcttctcggtgtgctcggccacgaagtagatcggccgcgccttcagctcggagaggatcttgccgatatattcgccgacgatgccgatcatgatcagttgcacgccgccgatcgtcatcacgccgatcatcagcgacggatagccgggcacctgcttgccggtggtcaagacttcccacaggatcgaaagaccgaacaggaaggccgcgccggcgagcagcgcgccgagcaggctggcgaagcgcagcggcgccaccgagaacgaggtcaggccctcgatcgagaggccgatcagccggccggcgttgaaggtggtgacgccgtgcgcgcgcggcgccggctcgtagtcgacgcggatctgcttgaagccgatccagctggcgaggcccttgaagaagcggttgcgctccggcaattgccgcaaggccgcggccgcacgcggcgacagcaggcggaagtcgccggcatcctcggggatctgctgccgcgcgccccagttgatcagcgaatagaagccgcgcacggcaagccgccgcaacgccgattcattgtcgcgatgcgccttcgccgtgtagaccacgtcgtagccgtcatcgatccagtgcgcgaccagttgctccaccagcgtgggcggatgctggccgtcgccgtccatgaacagcaccgcgccgcggcgggcatggtcgaggccggccatcagtgccgcctccttgccgaaattgcgcgacagcgacaccacctgcaggtcgagcccgtcggcgggcaggccgcgggcgatcgccagcgtgttgtcggcgctgccgtcgtcgacatagaccacctcgcaggcaagtccgtaacgggcacgcagcgaccttgcgaggtcgatcagccgttggtgcagcgcactgagcccggcggcctcgttataaacgggtacgacgatggacagaccctgcgcggcggcggtcttggcggtcgtggtcaggctggaaacgtcagagcccagcatcatcggtcaggttccagaactagagcgttttcgggcgacatggacgtccggttcgcgtgaggaaaacgcgtcacaacgagagatcatgcacacaatatggtaccggcggccggctgtcgccaacatgaacggcgcggctgactcattgtcgcaggaacgcctcgagcctggcgaacagcgggttctcgcggtcgaacacatagtccagcgacaccaccgacacggtctcggcgccgtgctcgcgcaggaagctgccgagcgcgtagagcttgcccggtgggcagtgcagcgtaagcatgcccgacgaggtcgggccgccgaacggggcgaccacgccgaaacgctgatgcgcctcggcgagcagcgcatcgttgcagccggcgaagcgggtgcgcacctcgcggtacttgctggcgcgggcccgcgcggcgatgtggtcgaggatcacgcgcgcggtctcgcgggcgccggtcgaccagtcggcatcctttgaggccaccagattggcctggctgcgcagcatcacgccgtcgtcgagcaccttgagcccgttggcggcgagcgtcgcgcccgtggtagtgatatcgacgatcaattcggcggtgccggccgcgggcgcgccttcagtggcgccggcgctctcgacgatgcggtagtcgccgacgccgtgcttggcgaaataaccgcgcgtcaaattgatgtatttggtcgcgacccgcattcggtgattgtgctgctcgcggaagcccgaggcgacgtcgtcgagatcggccatggtgcggacgtcgatccaggcctgcggcaccgcgaccacgacattggcatagccgaagccgaggccttcgatcatcagcacgcgcttgtcgggatccggaatgctctcgcgcaccaggtcctcgccggtgacgccgagatgcacggcgccgcgcgccagattggccgcgatctcgctcgccgacagataggcgatctcgacattgtcgacgccggcaatggtgccgcgataatcgcgcgcgccgccggctttcgacagggtcagtccggcgcgggcgaagaagctttccgcgttttcctgcaggcgccccttggacggaacggcgacgacgaagggcgtgctcatcggacgtctccgcgcagggccttgccgtgccgggtcatcgcctcgatccagaccgagaagccgaccgcggggatcggattggccgatccgagctgcgacatcagcccgtcatagcggccgcccgcgaccagcggctcgctgccgttgcccttggcgtgcaactcgaattcgaagccggtgtagtagtcgaggccgcggccgaatgcggtcgcgaaccgcgttgtcctgatgtcgatgccgcgcgcggccatgaagccgacccggctctcgaactggtcgatcgcagcggcgaggttgagcttggcgtcactggccagcgcgcgcagctgcgcgaccgcgtcgtcgggatcgccggatatggcgaggaagcgcttgatggtggcgaccgcatcgcgcggcagcgcgccggccttcaaggtcgattgctcgaggaagcggtcggcgatctcggccaccgtgcggccgccgacattggtggtgccggcgatcgacatcaaatcggtgaccagcgccagcgccgccttgcggtcggagccggccagcgccgcgagcacgccctcatattcgttgcggcccggcgcggtcgcaagcgtgagctgctcgatgtcgtcggtcagcgaaaccttgcggttgaaatccttgatcaggcggcgccgccacaccgggtagagctccagcgcgtcgatcagcgcgttgaacagcgcgacgtcgccagtgcggatctcgacgtccttcagcccgaacgccgtggtcgcctccagcgccagcgccagcatctcggcatcggccgcggcgcggtcctgccgtccgaaggattcgatgccggcctgcaggaactggctcggcgcgccgccgcgatagcggaacaccgggccgagatagctgaagccggccggctggccggcgcgaggcgaggcgaggtagtcgcgcgccaccgggatcgtgagatccgggcgcaggcagagctcttcgccgctcgggtcggtggtcagatacaggctcttgcggatgtcctcgccggacaggtcgaggaacggctccgccggttgcaggatcgcgggctcggacctgacgtagcctgcctgcgcgaacgaggccagcagcgcatccgcccataaggcggatccggcggcggatcgtggtgcggcagcttcggtcatctcgaggtccaattcgccccgaaatcgcgtttcgaggcaggttccataggtggtgttggcggagcccttagcatggccgatccatggtttcgacagggatcagccaaagatcagccaagtggcttaatgattgggttcgttaacgattttgcgacggcttggctaggggccgggcgcgccgagttgcgcgtgaggtgagcacgcctctcaggctccgtcccccgcaaggggggagggagccctcccgccggtgtctccatcaccaccaccccaatcgcccagcgccgcctgcaccagcgcaagcgcggcgacggcggcggtgtcggcgcgcaggatgcgcgggccgagtgcgaggcgaaggatgctgggccggcgcagcagcagcgcgcgctcctcctcggcaaagccgccttcggggccgatcaggacgtcgatcccggcgttcgcagcctttgccgcctgcagcgcttgcattgggttcgcgacctcggcggcctcgtcgcagaacaccaatagccgcgcctcgtcgcggccggcgaggtagcgctcgagcggcacgggatcggcgacctcggcaagcgagatgatgccgcattgctcggcggcctcgaccacattggcgcgcatccgctcgccattgacccgcgacacctgggtgaagcgggtcagcaccggcaccagccgcgcggcgcccatctccaccgccttctgcaccatgtaatcaagccgcgcatgcttcagtggcgcaaaaacataggtgacgtcgggcaggcggtcctgggcgcgggtctgcgtcgtgatcgtcagcgtgtcggcgcgcttgcggccggaaatcgccgcgcgccattcgccgtcacgcccgttgaacaccagcacgctgtccccggcgcccagccgcagcacgttgccgagataattgctctggtcgcgctcgagcgaaacacttgcgccggcaccgagcggcgcatcgacgaacaaacgggggctgcggaaatcgtgttcaggcatgttcggggaggatcttcaaattccctgacgggcatcgttcgccagcgttaagatggcttcactgctgctcgacaagtttaccaaactgaacgacaccgtaatctcgcggactcgccatgaattcgcgggccgggtaggaagaaagcgtcgatacattgcttctgtcaccaagtcatattggaagtccgaggggtcgcttgcacgcggccccttttgtgtttcggtcggtgtgcggagccgcgaatccaagcggcatggccggaaaatcccgttcaggcagatttgatggaccggccgtgccgccgttggtagcctaaaggcttagaatccgggaacaatttaatatggccggtgtggccctacgccgcgctgtcgccaaaatccacgggttgttaagggctcacaggaatcgtaaaacgcccccaaaattcgttgcttcgttttgttgcgctggggttgcctggaccttttgccggagaaacaccctcgatgatccgccgactgatcgtgctgaccgttgccgcgaccgccctgtctgcggggtgcgcggccgcccagagcgcttttccggctccgctgcctggacaggccggctccgtcaacgaccccgcgtttcctccggtgaacggcgcgcgtccggccagggccgcgaccgccccggattcggcattcccgccggtcaacggtgcgccggccgccagggtcggtgccgcgccgtcggcatttccgaccaatggtgcagctccgatcgcgggtggcggtctgtcatcgccgccgcccccgccgggtgccggcggcggtgccgccggtgatgcctgcatgaaggatttcgttccgctgcgcgaggagaccgagaagcgcggcaaagcgatcaaggcggcgagcgaccggcacgccagtccccaggaggcgtgcaagctgatcggcaattacagccaggccgaaatcaggatgatcaaatatgtcgacaccaatgcgtcgaaatgcggaatcccgccgcagatctccgatcagctcaagaccggccacaagaacaccgaagcgttgctgaagaaggtctgcaatgtcgcggagcaggctgcggcgcagccgcgcgggcccgcggggccgtcgctcagcgacgtgctcggctcgtccgcctcactgccggaagcgaccccgaccaagaagggcggcagcaccttcgacacgttgaacggcaacgtgctgacccgataatggatcgcgcaatggctggctgcagatgagcgacgtttccgcccgcgttgccgactccacaggcaactgggtggatacccatgcgccggtctggtcgcggccctatctgcggcttgcgcgctacgatcggccgatcggctcctggctgctgttgatgccatgctggtggtcggcggcactcgccgccggcgtcgcgcatgatgttcgctcgctgccgctcgtcgtgctgctgttcttcatcggcgccttcgtgatgcgcggcgccggctgcacctggaacgacatcaccgaccgcgatctcgacgccaaggtcgagcgcacgcggtcgcggccgatcccggccgggcaggtgagcgtgacgcaggcggtggtcttcatggtcgcgcaggcgctgatcgggctgctcgtgctgctgcagttcaaccgcttcgcagtcatgaccggcatcgcctcgctcgtgatcgtcgcgatctatccgttcatgaagcggatcacctggtggccgcaggtcgtgctcggcctcgctttctcctacggcgccctgatgggattcgcggtaacgctcgaacgcatcgatctgactgcgatcgcactctacgccggatcgatcgcctgggtgatcgcctacgacaccatctacgcccaccaggacgccgaggatgatgcgctgatcggcgtcaaatcgaccgcgcggctgttcggtgcacgcacccatcgcgcgctggtgatcttctatggcctcgccgtgctgctgatcggcacagcgtttgcgcttgctggcgcgcgctggccggcctggatcggccttgcggcattcgcgctgcatcttggctggcaggtccggcggcttgacaccagcgacggcgcgctctgcctgcgcatcttcaaatccaaccgcgatgccggcttcatcctgttcgcgagcctggtcgtcgatgcggtgatgcgggcggcttgacggcttccgtcattcccctgcggcccgatggattgcgggttctcgcttcgcgagttgaatcgagcagcatcctcgggtcgtcccggcgaaggccgggacccataaccaccgatactgcttgttgtgtgatgctggaacgacgaatccccgtcagcaacatctgctgcggcgtatgggtcccggccttcgccgggacgacaccgattttgtggcgaatagaacgccagacgacgaaactaatcccgcgcgatgatctcgcgctcgtcgcgatgcacgctcgcttcgttgaggcggaaaccggtacggcggcggaccaggaatttcgggcggcgggcgcggatcgcgttgcggcggcggcggcgcggggaaggcatccgcggcggcggctcggtcagttgcggcaggcggaagatgtcgctccacatctgccaggcggagttgatttcgtcggcgtccgaactggcgccgagcggaatggagagcgcgggatcgcggtgaaccagcaccagcatctgcgcgtcgtcgatgccgcgcaccgcgacgccgaggaaatcgctgacgcgaacattgaccgccatccgcatgccgcggacggcgcggcgcagcacgacatgttcgcgatgaagctcgacctgccgcgtgccgccgtccgcgcgcgcatcctgcgcgtggaaagagagcggaagggaaagagggtcgagccgcattgcgcagctcgacccggcggaattgattccgcttgttggtgtttgacgcctcaaagctctagtctccccgccggaattatgttcccggtcgatgtgtgagagcctagccgagcgacggccgtttcagcttaaaaagcctggttaatcgctcctcacctggcgccatgattgacaagaggttggcccgcatgattgacgaagccttgcgccgatcactcaaatctttgttgcccgccggcgcaaagtgcttgaaatccctgtgaatccggcacatctggtgaggtctgtcgacctcgttccgggctcccctcaatccgcaggaattcgttcgtgaactcttcaccatctgcatcgcgacacggtgatacctccgatctgttcgaccaatccgcgctcagcgacctcgcgcagcgtctggtcgatgccgccaggcgtgcgggcgccgacgccgccgatgccatcgcggtgcgcggcgtctcgcaaggcgtcgaggtgcgcgatggccgcgtcgaggaaaccgagcgctccgagggcgacgacgttggcctccgggtgttcgtcggccagcgccaggctgttgtctcgaccaacgacgtcaccggcgacgggatcgcaaagctcgccgagcgcgcggtggcgatggcgcgcgtggcgccggacgataaatatgtcggcctggccgatccggcgctgcttgcgcatgatttccccgatctcgatctgctcgaccgcaacgtcccgagcacggccgagctcgagcagcgcgccatcgcggcggaggccgcggcgctcgcggtcaagggtgtcaccaagtccggcggtgcgtcggcctcgaccgggatcggcggcatggtgctggtgacttccaccggctttcacggttcctatctgcgctccagccacggcatctcgacgacggcgatctccggcgagggcaccggcatggagcgtgactacgacttcaccagcgcgccgcacgcctccgatctcgattcacccgcgaccgtcggccgcaaggccggcgagcgcgcggtggcgcggttcaatccgcgcaaggtcgagacctgcaaagtgccggtcgtgttcgatccgcgggttgccggctcgatcgtcggccatctggtcggcgccatcaacggcgcctcgattgcgcgcaagaccagcttcctgaaggacaagctcggcgaacagctgttctccaaggacatccgtatcatcgacgatcccttgcgcgtgcgcggcctgcgctcgcagactttcgatgccgagggcgtcaaggtgaagaagatcgcgctgatcgacgaaggcgtgctgaccacctgggtgttggactccgcgaccgcgcgcgaactcggcctggtcacgaccgggcacgcgcatcgcggcgtgtcgtcgtcgccgtcgcccggaacctataatctccatctcgagcccggcgcggtgacgccgaagcagctgatctccgacatcaagcagggcttctatgtcaccgacctgatcggctccggcgtcaacggcgtgaccggcgattacagccgcggtgcctccggcttctggatcgagaatggcgagatcacctatccggtcagcgaggtgaccatcgccggccatctgctgccgatgttcaagtcgctggtcgcagccaacgatctcgagttccgttacggcgtcaattcgccgaccctgcgcatcgagggcttgacgcttggcggacgctgatacggacgactggaccaaggcgcgcgatgccgccttgctgaccagatcggtgcaggaggcgggccggctcgcgctgtcgttgttccgcaccgaattgaagaactggaccaagggcgcgtcctcgccggtctccgaggccgacatcgcggtcaacgatctgctggagcagcagctgcgctcggcgacgcctggctatgggtggttgtcggaggagagcgccgacaacgagagcaggctcggcaagcgcttcacctggatcgtcgatccgatcgatggcacccgcgcctatctcgccgggcgtgaggattggtgcgtcagtgtggcgctggttgaaaatgcggctccggtgctcgcggcggtgtatgcgccggtgagcgaggaattcttctttgccgcgcgcgggcagggtgccatccttaatgacgccgccgtgcacgcaaccgcaggcaccgatttcgattttccccgcatggccggaccgaaaccgctggtgcagcggctcagcccgtcgccggacgagatcacgttgtttccgcggatcggatcgctggcgttgcggctgtgccgcgtagcacaaggtcgacttgacgcggcctttgcgggcgggcaaagccgcgactgggatcttgccgccgcgaatttgatcgtgcaggaagcgggtggtaagatgaccgcgctctcgggggatgcgattgagtacaatcgccgggaggtgacgcatggggtgctggtggcagcaggacgcgaacgtcatgcacgtattgtcgagcattttcgcagccgtccattgccgtgaggccccgccgatccgctccgcgcttccgattgtgacgaccagacttgcgacagacttgtgacgatcagacttgtgacgaccagacctgtaacgaccacgacttcagtgctttgccgggcatctcgttaggaaaaccaccatcatgtcagacaatgcccagccgcaactgcttcacctcgtgatcggcggcgagttgaccgatctcgagcacaacaccttcaagaatctggacgaagtcgagatcgtcggagtctacccgaactacgcgaccgcctatgcggcctggaaggcgaaagcgcagcagaccgtggacaacgcccagatgcgctacttcgtcgttcacctccaccggttgctcgatcctgagcaggacacaaagcactcccattgaaacgacttcttcgcgatctgctgcgcagcggcttcgtgcagcgcgcgctgggtgtgcttgcggccgaatatctgcggctggtctggtacaccaaccgcttcagctaccagccctctgacgtgtacgggatcgtcgagcccctgatgccggcgatcttcgtgttctggcacggccagcacttcatgacgccgttcatcaagaccaaggcgagctaccgcgccaaggtcctgatctcccgccaccgcgacggcgagttcaatgcgcttgcagtggagcggctcggcatcggcaccatcaggggttccggcgaccattccggcgcgttccaccgcaagggcggcgtcggcgccttcctggagatggttcggacgctggaagacggctgcaacatggccaccacggccgacgtgccgaagcgggcgcgggtggcgggtctcggggccatcatgctggcgcgggagagcggccggccgatcatcccgttcgcgatggtcaccagccgcttcatccggttgaaaaactgggattcgaccaccatcaatttgccattcgggcgcggcgcagtggtaggtattgagccggtctatgtaccgccggatgccgatgccgcgacgatggaaaagcttcggcagcacgtggagaatctgctcaatgaagcgacccggcgcgcctatgctgccgtcgggcggccggaggcaacgcttggctagctcgctcccgatgacgttgcgtgtttaccgcaagctgtcgtccgcgatggtgcctgtggtgcctgccctgatcaagcggcggctcaagctcggcaaggaagatcccgaacgcgtcggcgagcggcgtggcgtgagcggcgatgtcaggccgcagggtccgctggtctggatccacggcgcgagcgtcggcgaggtgctggcggcggtggggttgatcgagcggctgcgcgcgctcaatttgcgcatcctgctcacctccggcactgtgacgtcggccgcgatcgtggccaagcggtttccgcccgacgtgatccatcaatacgtgccgtatgactcgccgcgctatgtcgcgcgttttctcgatcactggcacccgtcgctggcgctgttcatcgagtccgatttgtggccgaacctgatcctgtcctgcgccgcgcggcggctgccgatggtcctgatcaacgggcggatgtcgccgcgttcgttcccgcgctggcgtcggctctccaacaccatcgaggcgctgctcggacggttcgacatctgcctcgcgcagtcgaacaccgacgccgaacgctttgccgcgctcggcagccacaacgtcgtcgtcaccggcaatctcaagctcgacgtcgccgcgccgccggccgatcccgccaagctggagcggctgatgtcggtgacgcgcggccgcgccatcgtggtcgccgcttccacccatcccggcgaggaagagatcctgatcgaggcgcacaaatcgctcgccaaattcttccccgggctgctcacggtgatcgtgccgcggcacgcccatcgcggtgaggcggtcgcacagctcgtgacggctgccggcctgcgccccagtctgcgctcgcacgaggacctgccggtcgcgacgacggatatctatgtcgccgacaccatgggcgagctcggcctgttctaccgcctcgcgccgatcgtgttcatgggcggctcgctggtcccgcatggcggccagaatccgatcgaggcgatcaagcttggcgctgcgatcgtgcacggcccgcacgtgttcaatttcaccgacgtctatgatgcgctcgatcgcggcggcggcgcgcggcttgccgatgaccgggacgcgctggtcaagcagctcggccagttccttgccgatcccgccgcacgcgacacctcgctcgccgcctccgagcgcgtcgtcgaacagcttggtggtgcgctggagcgcacggtgaccgctctcgagccctatctgttgcagttgcggctcgagatgggagccgccaatgcgtgagccggccttctggcaccggccgacgtcttggatcgcatctctgttgagtcctcttgccgcgctgtacggcgcggtcgccgcgcggcggatgcggcgccccggcgccgatgccggcattcccgtgatctgcgtcggcaactatcatgtcggcggtgccggcaagacgccgacggtgctggcactggcgaaattgttgcgcgagctcgacgagcggccggtggtgctgagccgcggctatggcggcaggctcgaaggcccggtcaaggtcgatcgtgacaggcactcggcggccgatgtcggcgacgagccgctgatgatggcggcgtccttgccggtggtggtgtcgcgcgaccgcgccgcgggcctcgcgctggcgcgcgcgcaggatgccagcgtgatcctgatggatgacggtttccagaatccgtccgtggccaagaacgtcagcctgatcgtgatcgacgccatgcgcggcgtcggcaacggccgcgtcattccggcaggcccgttgcgtgcaccgctgtcgccgcagctcgcgcggaccgacgcgttggtcgtggtcggcgaggggagcgcggcagcaaagatcgccgccgatctcgcgtcgcgtggcaagccggtcttgtctgcacgtctgaagccggaccaggcttcgctggcggcgctcggcggcgagcgggtgctcgcctttgccggcatcggcgatcccgcgcgcttcttcaacacgctgcgctcaagcggcgtcgacgtcgtccgtagcagggcctttgccgatcaccacgccttcacggcggacgagatcgaacagctcacggccggcgcgaaagctgacgccttgacgctggtgacgacggaaaaggatctggcgcggctgcgcgatccgcgcgggatgccggcctcggcacaggcgatcgtgccgttcgcggtgacgatgcaattcgacgatggggctgcgctgcggcgcttcgtgaccgatcagctgttcaaggcgcgggacagcaagctgcgcggatgagcccggcctcgggctcaggcctgcggcttgagcacgccgggatggtggcgctgcagcacggcggtcggcgtggcgtaggcctcctgcaggtcgacgctccagtacttcagctcgtcgagcgggatccggacgtcggtgatggcacaacgcacaaaggtgccgggcgagatcacgcggaaatcgccatcgagatattgcacctgcgcttcgccatggcccgagggaccgaacttgttcagcacgtttgagctctccgccttgcctccgatgaggcactccaaatgttcatgaatccgtctatcacagatagggtgtcatgtccgcccgttaaaccaccgacttgtgatgatttggcggcgaaagcgcgtggtaccgttgccgatgtggtccgctgtgttggcagcgccataacgagccggccggatcggatgcgcctcaagtcagttctcatctgcctcgcgatgcttgccctgccggccgcggctgcggcgccgcttccggccccacgccaggtcgagattgccgaaggcaatatcacactgcatgcgcagctctaccggcccgatggtgacggcccgttcccgacggtgattgcgctgcatggctgcggcggtctcgccggccattccgagccggtcgcaccgcgctatcgcgactgggccgagcagttgctcacatcgggccatgcggtgctgctgccggacagctaccgctcgcgcgagctcgggccgcagtgccgcatcagggagcatcaggtccagaaccgccgggcgcgggtcgccgacatcaatgccgcgcggcagtggctggtgcagcagaaatgggtggcgaagaaccgcatcagcctgatcggctggggcaatggcgcggctgctctgctgtgggcggtccggccgcagctgtggtcgcgcaacgccgagccggacttccgctcggcagtcgcgttctatccggactgccgcacctcgttcggcctcggctggagcgcgcgggtgccgacgctggttctgatcggtgcccgcgacgatgtgacgtcgtcatcggcctgccaccagatgatcgacggcgcgcgcggccgcagcgcgctggcgcggatcgtgatctatcccgaggcgtatcacgatttcgaccgggccaatctgccgctgcatgcggtcgcggcctccgatgccgatatggcggagcgtggacacatcggcaccgatgcggacgcgcgcaaggatgcgcagaagcaggtcgccgagtggctgtcgcgctagaataaactcccttggtcttccggcttgacggcgcgcttcggcgccgccggtttcgcctcgcgctgaggcttcggctggctctcgggcgttgccgttgccgcgggctgatcggcattggtggtggcggcgacgcggccatcggcgaattcgatcgacaggctggcgttggggccgaccgccgccgcggaatgcagtgcgtgtccgtgcgcgtcgcgcaccagcgcgaagccgcgcgccagcacgccgcgataggacagcgccgacagcaattgtccgcggtgggcgacgcgtgcctccagccgctgcagcgtcgtcagcagcgcgcggcgggcgcgctcggcgaggcggtgggtgcgctccagatcgcgcgcgatcgcggtgcgctgcgccttggcattggcgagcttcgaggctttgagccggatttcgagcccgctgaagcgctcgcgccggcgatgcagcagcgcgcgcgccgacagcgtgatgcgctcgccggatgcggtgagccgctgccgcgcatgcgcgacctggccgcgcagcacgccgatggtgagccgcgagctcgacgcggcaaagcggcggaaatgcgcatgcgtgttggccttcagcccgcgcggcagcccggctgcgagatggtcgagccgctgccgcgggatcgcgagcagttcatttgccgccggcagcgcacgcgctgcggcgcgcagctcggtgcggcgggcctcctggccgcgctgccagcacaccatggtgcggcgggccagcgcggcaatctcgacgaacagttcgctgcgcaccggcaccgccatttcggcggcggcggtcggcgtcggcgcgcgcttgtcggcgacgaaatcgatcagcgtgatgtcggtctcgtggcccaccgccgagatcagcgggatgtggctgtcggccgcggcgcggaccacgatctcttcgttgaacgaccagaggtcctccagcgagccgccgccgcgcgcgacgatcaacaggtcaggccgcggaatccggccgcccgccggcagcgcattgaagccgcggatcgcggccgcgacctgttcggccgagccgtcgccctgcaccttgaccggccacaccagcacccggcggggaaagcggtcctcgaggcgatgcaggatgtcgcggatcacggcgccggtcggagaggtgacgacgccgatcacctccggcagccagggcaacagctgcttgcgcgcctcgtcgaacaggccttcggccgcgagcttcttcttgcgctcctccatcagcgccatcagcgcgccgacgccggccggctccagcgagtcgatgacgatctggtatttcgaggagttcggataggtggtcagcttaccggtggcgatgacctcgagcccttcctgcggcttgaagcgcatccttgcgtgggcgaacttccagatcaccgcctcgatcttggcgctctcgtccttcagggcgaaatagcaatggccggaggagtgcggtccgcggaagccggagatctcgccgcggacgcggacatggccgaaccggtcctccaccgtccgcttcagggcggaggagagttccgagacggtgaattcgggcgcgttgacgaggctaggcgcggcagcggtcatttgcaggtgattcggctgtttgtgagcttcaccgcaacgtagggacttttgtccgccatcgccaaccgcgggcttgcttgtgcatatactctgtgatatagagttctctatcaagggcgagctgctcggaggttgaccgatgctcccacaggtgacgttggcaggtttggtccattccgcggccggcgcggtccatgccgtcgtggcgatgctgtgcattgctgtcgggctgatccagttcctgcggccgaagcgcggcgcgggccaccgggcgcgtggctatttctacgtctatgccatgctggtcggcgacgggaccgcgatgctggtctaccggttcaccggcgccttcaacctgttccacctcggagcgatcgtgaacttcgcctgcatcgtggcggcgattgttccgctgctgcgcagcccgcggccggcgaactggcgattgaagcactattatttcatctcgtggtcctacgtatcgctgatgtcggccgcggccaccgaaatcgcagtgcgcgtgctgccgctgacgacgcgcggacagattgggctgaccgcattggccctgtcgatcgtgatcatgacgctcgcctatgtcctgatcggaaaatatcggccgccgccggaaaccccgccggtttccgctcgattcgccgagcagagtggggtgccgtcttgatcgacagccagcaggccagcgcggcgctgaacgacatcaacgacgtcgtgcatcgcgtccgccagtcgcgaatctatcagaccgccagtctgatcatcatcatgtggggcgtgttggtattcgcaggctacatcgccaattacacatggccgccacagggccatacgatctgggccgtcgtcgacctcatcggaatcgcgggctcgatcgctattgccgcgttcagcggtgtcggtccgggggcgggcgccttcgcgctccgattgctggtggcgttcctgctgttcatcgcattcggcattttctactcggcagtgttgggtcatttcgggccgcgccagatgctggtgttctggccgctcttcacgatgctgttctatgcgctcgccggcctgtggttcggctacgctttcatcgtgatcgcgctcggcagcagcgccttgatcgtgaccgcctacttccatgccggtccggcgctgctgctgtggatggcggtggtgcatggcggcgcactcatcctcggcgggctctggatgcgccggatctaacgcgatggccgaactcgacgagatcatccaccagccgctgcggctgcggatcatggcggcgctcaatgcgctgccggtttcgaccgggctggaattcgcccggctgaagaagctgaccggcgccaccgacggcaatctcggcgcccatatcgagacgctggcgcgggccggctatgtcgcggtcgacaaggccttcgtcggcaagaagccgcagaccacggtgaccgcgaccgcggccggtcgcggcgccttcgcccgccatgtcgcgaccctgcaggagatcatcgcgggcaagcagccgtgaggctggaatgacgggggaatcggccccgtcgccccttgcaggccggcggggattcgtgcgaccgacacagctctcgcacccatttgagcctgtacctgatgaacatcctcctgctcggttccggcggccgcgaacatgcgctggcgtggaagatcgccgcatccccgctggtgacgaaactctggtgcgcgcctggcaatgccgggatcgcgcgcgaggccgagtgcgtcgcgctcgatgtcgccgaccatgccgcggtgatcgagttctgccggcgcaacgcggtcgatctggtggtggtcggtccggagacgccgctcgccgcagggatcgtcgacgatctcgccgctgtcggcatcaaggcgttcgggccgagccagcaggccgcgcagctcgaaggctccaagggcttcaccaaggacctctgcagcgagttcaatattccgaccggcgcctatcgccgcttcgacaatgcgaaggacgccgtggcctatgtccgcgcccagggcgcgccgatcgtggtcaaggccgacgggctcgccgccggcaagggtgtcgtggtggcgcagacgctgcatgaggcggaagccgccgttgcgatgatgttcgagggcgcgttcggcgcggccggcgccgaggtcgtgatcgaagaatttctgtccggtcgcgagatcagcttcttcgcgctgtgcgacggcgagaccgcgatcccgctcgcgaccgcgcaggaccacaagcgggtgttcgatcacgacaaggggccgaacaccggcggcatgggcgcctattcgccgacgccgttcgtgacgcctgaaatccatgaccagatcatggcgcggatcgtcctgccgacggtcgccgggatgaagcgccgcggcatcccgttcaagggcgtgctctatgccggcgtgatgctgaccgcgcagggcccaaaactgttcgaatacaacgtccgcttcggcgatcccgagtgccaggtgctgatgctgcggatgatgtcggacatcgtgccggcgctgctcgcctcgatcgacgggcaattgaagaatttcgatctgcgctggtacccggacccggcgctgacggttgtcatggcggccaagggctatcccggcgactacatcaagggcacccggatcgacggcctcgatgacgccgccaaggtcgagggcgtcgaaatcttccacgccggcacggtggcgaaggacggcgcgatccttgccaacggaggccgcgtgctgaacgtctgcgcgatggccaagaccgtcaccgaggcacgcgatcgcgcctatcaggccgtcgatcgcatcaaatggccggaaggattctgccgccgcgacatcgcctggcaggcggtggaggcggagcagggctagctcaccgcgtcattgcgaggagcgaagcgacgaggcaatccacctctccgcttggggcgcgatggattgcttcgcttcactcgcaatgacgattaactacagcagatccccgcccgccgcgctcgccgtggtgccgtgctcgcggaacgccttgatgacgttcttgccgatcttccacttgtgcacctcgtcggggccgtcgaccagccgctgcgaacgcacctgggtgtaccatttcgccagcggcgtatcctggctgaagccgagcgcgccgtgcagctggatcgcggtgtcgatcaccttgtgcaccatgtgggcgtggaagatctttgcgatcgagttctcctggcggatgtcgaggcccttctcggctttgtaggcgatgtgcagcagcatcagccggccgatatagagctcgctggcgcaatcggcgagcatgaactgcaccgcctgccgatcggccaagagctggccgaaggtcgagcgcttggtgacgtgcgctgccgccatgtcgagcgcgcgctgcgccttggcgacattgtgcatgccgtggcgcagccggccgtaggcgaggcggtgctggcccatgttgaagccgttgccctcgccgccgagcaggttgtcggcgggtaccttcagatccttgatctcgatctcggagtggccgccatggatcacgtcgtcatgcggaccctcgatcgccatgttggcgacgttgcgcttgatgcggtagccgggattgggcagctcgacgatgaaggtcgagtattgcttgtggcgcggcgcgttcggatcggtcttggccatgacaagcgcgaggtcggcgacgctcgccgacgacgagaaccacttttcgccgttgaggatgtagttctcgttgccgtccttcaccgccgtggtctgcatgccggtggcatcggcgccggcggccttctcggtcatcgagaagcagatccgcttctcgccgttcagcaggggttttaggaatttctccttctggtactcggtgccgtgcgccaggatcgtcatcatcgaggcgtcgtccggcccctgtgtgttcatcgagagcgcgccgagcatgctctcgccgagctccatctgcaccagcgcgttcgccagcgggccgagacccatgccgccatactccttcggcacgaacgggcaccacaggccctgcgcgcgggccttcttgcggagcggcgccagcacctcggcaagcggcttggtgtcgagttccttttccgccggaatgcactcgtcatgcacgaatttgcggaccttctcccggatcgccttggcttcagcgggaatctcgaagtcgatcgacatggcacttcctcgtttcatgttgttgttggctaggcttgaggatggcataaacctcgcccatgccagcggcaacgccgaacaaagtttgaagcacggcgcacgcgaccgggaggagccaccgatgcctgatctcgccgatctttttcccggttatgaagcgaaatggatcaacacctcgcagggccgcatcttcgcccgcgtcggcggcaagggcccgccgttgctgctgctgcacggcttctcctcgacccatgtgatgtggcacacggttgcgccgaagcttgacgacaagttcacgctgatcatcgccgacctgccgggctacggctggtccgacatgcccgccagcgacaaggatcatacgccctacaccaagcgggcctgggcgaagaccatggtcgaggcgatggagcaactcggccatgtgcacttcgcgctggccggtcacgatcgcggcgggggggtctcataccggctcgcgctcgatcatcccggccggctgtcgaagctggcggtgctcgatatcgcgccgacttatgactattggcagaagctcaatcggctgtcggcgctgaaaatctaccactggtcgttcctcgcacagccctatccgctgccggagacgctgatctccaacaacggcgaattcttcctcaaggaaaagatggcgagccagaccaggaccaagacgctggaggcgatcgacccacgcgcactcgaacattacctcgcgccgttccgcgatcccgcccgcatccacgcgatgtgcgaggactatcgcgccggcgcctatgccgactttgaaatcgacaaggccgatgtcgatgcgggcaagaagatcacgatcccgatgctggcgctgtggggcgatgccggggttgcgagcgctgcgacgaccccgctcgacacctggaagaattgggccaccaatgtcagcggcgcaccggtggcgtcagggcatttcctgcccgaggaggccccggacgcgaccgcgaagctgttgcgggagttcttcctggcggggtgattccaccctgcatcgtcatcctgacaaatgtcagtgtatggttcacaggctgcgccaaacattcagcgtcgtcctggctttcgccaggacgacggggtgacagatctacttttcgcgtcccctaccgccgctcccggaagaactcgcgcagcagccgcgccgcctcggtctcgccgaccgcgccatagacctccggaacgtggtggcaggtcggttgtgcgaagaagcgcacgccggactcgaccgcgccgcccttggggtcggcggcgccgtaatacagccggcggatgcgggcaaaggagatcgcgccggcgcacatggtgcagggttcgagggtgacatagaggtcgcaatcgaccagccgttcggtgccgatggcctctgccgcctgccggatcgccaggatttcggcatgcgcagtggggtcgcgatcggtcaatgtccggttgccggcggtggcgatcacctcatagccccgcacaatcacgcatccgatcggaacttcgcccgattttccggcattttcggccgttttcagcgccaaatccatgaaagaaggggccgacatgcctcgtatcatcggaagaaacctgctagtagcttcgccttcagcaaaagtggatgccggttttgcgtcaagcgcgctgccaacggggcgcgcacgaccggttggcccttgcaccccaattgaacgcccaggcgagaacattcatgccccgcgatagcgacaaacacaacgattcccgcggccggcgtgaccggcccggcggcggcaagggccgctccggggccgcccgcgggccggagaagaaattcgccaagcgcggcttcagcggcaaagacttcgccggcaaaggcgatggcgagaagcgtccgtaccgtcgccgcgaagacggcgatgcgccgcgccgcgatttcgacgacaagccccgattcagccgcgacggcgaccgtccccgcggagatcgaccgttccgtgaccgcccaggacgcgacggcgacggcgagaagcgcaccttcaagcctcgtggcgaccggccgcggtttgaccgtgacggcgatggcgaaaagcgtgagttcaagccgcgcggtgatcgcccgaactacaaccgcgatgaccgcgggccgcgccgcgatcgcgatgacgcgcgtccagcggggcggtcttccgaccggaagttcggcgaccgcaagccctacgcgccgcgcgaccgtgacggagagaagcggccctacacgccgcgtggcgagcgatcgttcggcgaccgtccttcgcgcgatggcgatcggcccgcgcggaaattcggtggggacagcaagttcaagcgcggcggcgatcgcgatcgcggcggagatcgtgaccgcggtccgcgcaaggatttcggtgatcgtccgccacgcggcgaatccaagccgtggcagaagcgagaaggcggctccgatcgtccggagcgcggttcgcgcccgttccgcgacggaccgcgcaagttcgacaagccgcgagacgatcgcggtggcgacgagcggccgcggttctcgcgttcgcgcgacgatcgcgagcagggtgatcggccgaagttcagccggccgcgctggaaggataatgatgaaggcggcgaccgccggcgcgagcggccggaagggcgcagggattggcaggagcatccgcgcagcgagggccgcttcggcgatcgtccgcgccgcgacaatgaggacgacagcaaggttttcgcgaagcgcccggccttcggcggccgcggcgcttatcgcgaacgctcttatgacgaccgccgcgagcgtcccgagccgaagccgaagaagtccggcgaacgcatcgccaaggtgctggcgcgcgccggtctcgcctcgcgccgcgatgccgaggagatcgtcacccaggggcgcgtcaccgtcaacggacgcgtaatcaactcgccggcgctcgatatcaccgacagcgacgtcgtggcggtggacggcaagccgttgccgccgcgcgagcggacgcggctgttcatgtatcacaagccgcgcgggctgatgacgacgcatgccgatcccgaggggcggccgacggtgttcgacaatctgcccgagggcctgccgcggctgatctcgatcggccggctcgatttcaacaccgagggtctgctgttgctgaccaatgacggcgggctggcgcggacgctggagcatcccgacaccggatggctgcgccgctatcgcgtgcgcgcccatggtgaggtgacgcaggcccagctcgaccagctcaaggacggcgtcgaggtcgagggcgtcaaatatgggccgatcgatgcgacgctggagcgcgatcagagttccaacgtctgggtggtgttcgcgatccgcgaaggcaagaaccgggaggtgcgcaacgtgatggcgcatctcgggctcgaggtgaaccggctgatccggatctcctacggcccgttccagctcgccgagctcgaggagggcaaggtcgaggaggtcaagacgcgggtgctgcgtgagcagctcggcgagaagatcgccaagatcgccggcgccgacttcacgcggccggagcagcgtgacgccggcgacgacgaggcgccagccaggaaaccgaagccgagcaagcgcgagacgatcaacgatcgcaagggccgccgcgtgctggtgcagcgcaccggcagcgaggaagcccgtgcccgcaacgaggacgaggccaacggctacggcccgccgcgccgccccaagcgcggctatcacggcaagcgcgatctcaagccgcaggacgagtagcggtcgatgcgtgtcgtcgggggcaggctgaagggtcgcaacctcgcgtcgccatcggggcgcgagatcaggccgaccgcggaccgcctgcgcgagtccgtgttcaacatcctcgtgcacgcctacgacaacccgatcgaggatgctcgcgtgctcgatctgtttgccggaaccggcgcgctcggcatcgaggccgcgtcccgcggcgccaggttcacgctgttcgtcgacaatggcgcggaggcgcgggcgctgttgcgcaacaatgtcgagtcgctcggcctcggcggcaccaccaaggtctatcgccgcgatgccaccgatctcgggccggcgcatccggtcgagccgttctcgctggtgtttctcgatccgccttatggcaagggcctcgccgacaaggcgctggcctcgctgcgcgacggcagctggctcacgccgggcgcgctgctcgtggtggaggaggccaaggccgcttcgttcgccgtgcccgacggtttcgaggagctcgagcggcgggcctatgacgacacggaattcgtcttccttcgcgaaaaagtgtagggcgtagcggcctccatcgaccctatgctgcgccagcgtggacgacggaccgatcgtcgctttcggagcgtgaaccatggccgacactctcgccgggctcgcaggtcagctggaggcgcgcgtcaaggcgttgcgcggcggcggcgatgacgcggcgctgcttgcggcggcgcgcgacgccgccgaccagatcgggcgccgccgcggcgcgctcgacgccgacgcgcgcgaagcgctcggaatgattcagcggatgacgttcaacgccgcggccgattgctggccgggctggggcgtttcggacaaaccgatcgatccaaatcatctgctggcggcgcgtgaccttgccgagcgctcgttggatcttgtgcaggagctggagctcgggccggcgcggctcggaacgggcgcctggctggtgggcgccttcgatctggcgcttggccgctatgacgaggcgatcgacatctttcgcggcgcgcgccggaactatctcgccgcgagcgcgcccggcctggtgctgctgacggacggctatgtcgcgatcgcgcggcaattggccggggatcggacttcatccgacgatcaaggtttcgatcaggtctgcgagcggatcgcggcaggcgggttcgagcacggcgacgaatggatcgcgcagctgcgcaccgcgctggaggtgttcgcgcggcaagtgaattcgtaggatgggtagagcgcagcgaaacccatcatcgtgtcacgcggacgaaagttgatgggtttcgctgcgctctacccatcctaccgcatgctgcgagacctaccgccgcccgaacagcttctcgatgtcgctgagcttcaattcgacataggtcggtcggccgtggttgcactggccggagttcggcgtgtcttccatctcgcgcagcagcgcgttcatctcttccggcttgaggcgtcgcccggcgcggaccgagccgtggcaggccatggtggcggcgacatgcatcaggcggcgctccagcggcagcgcctcgtcccactcggccatgtgttcggcgaggtcgcgcaacaggccggccgcgttggtcttgccgagcagcgagggcgtctcgcgcacggcgatggcgccgggaccgaaggagtcgatcgcaagcccgaacgaggccagctcctcggcacgatcgtgcagcttctcgacggtggcctcgtcgagttcgacgatctcggggatcagcaggatctgccgctgcacgccgttcttcgctagcgaggctttcagtctctcatagacgatgcgttcatgcgccgcgtgctggtcgaccacgatgaggccgtcgcgggtctgcgagacgatataggtctcgtggatctgggtgcgcgcggcccccagcgggcggtcgagcagatcgggagctggcgccgcctcgaagcggacatcggcggtcggcgcgccgacgtcgaaggcggcctgtccgggctcggtgaaggccgtcgccgcagcgctctcgaagccgcgcatcggaccagccggataggacggcgagctgcgccagtcccaattgcctggacgcggtggcgtgaacgcagggcggaacgcctgcaacgttgcgccgtcggcggtgttggccgcggtgcgccggccttcgcgcgcaagaccgtccttcagcgcatgcacgatcagcgcgcgcaccaggccggcgttgcggaagcgcacctcggtcttggccggatgcacgttggcgtcgacctcttgcgggtcgcagctcacgaacagcgccacgacgggatggcggtcgcgcggcagatagtcggaataggccgcgcgcactgcgccgaggatcagcttgtcgcgcaccggacggccgttgacgaacagatattgcccgagcgcgttggcgcgggtcaacgacggggcggcggcaaagccctcgaccacgacgccttcgcgctcggatcgcacctcgatcgcgctggcgcggaaatccgcgccgaggatatcgccgagccgggtcagccggccggccgcaccgggcagggcggccgcccaggtcaccggcgcgcgctcttcgccggccagcgtgaaggcgatgtcggggcgcgccatgccgagccgccgcaccacttcgcggatcgcctccgcctcggtgcggtcggtcttgaggaatttcagccgcgccggcgtcgcataaaacagctcgttgacctcgacgcgggtgccctggccgagcgcggccggcatgatctccgatttctcgccgccttcgaccgacagcgaccaggcgtgcggctcgctggcgtggcgcgtcgtgatgccgagcttggccacggcgccgatcgagggcagcgcctcgccgcggaacccgagtgtgcggatgcgcaacaggtcttcgtcgtcgagcttggaggtggcgtggcggtcgaccgcgagcgcgaggtctgagcgggtcatgccgccgccgtcgtcggtgatgccgatccgccgccgcccgccgccatcggtgaacacgtcgatccggctcgcgccggcgtcgatcgcgttctcgaccagctccttgaccacgctcgcagggcgttcgaccacttcgccggcggcgatgcggttgacgagctgttcgggaagctggcggacgggcatgaattgcgcgatcggacacggattcgaggttcggcggcattctagtcggctggccggccaaatgcatggggcggtccgcgaatggctgccttttactggggatggagccggcctatcgccttgaagacgctcaccttcgcgtgtgcatcggctacgccctacgtggcgattgtggggtcccacgggcgggtatatcgtttagaaaaattataatccgatcgggaggatagctatgtgccatttgttctcgcaccagccgcagcgcaattatgagtcgcagacccggtcgctgcggatcggcggtcactgcacctcgatccggctggaaatgtcgttctgggatacgctggaggagatcgcggcgaaagaggggatgagcgtcgccaagttcgttaccacgctctatggcgaagtcctcgaccaccatggcgaggtcaacaatttcgcatcgctgctgcggtgctgctgcctgatctatcgctcgcagagcacagctgcggtgcccgaattccggggccagccgatcctcgacgccgcggaataacctttcggattcatcgcgcagaaaaacggccttgtcctgttgggcaaggccgcttcagtgagaggggaactgtagtttcttgctagatctccttgcgctgcatcgcgccggcgatgtggtcggcctgccggatcgccagcgacacgatcgtcagcgtcgggttgcacgccgctccgctcgtgaactggctgccgtcggagacgaacaggttcttgatgtcgtgggtctggccgaacttgttgaccacgccatcgcgcggcttctcgctcatccggttggtgcccatgttgtgggtcgagggatagggcggcgtcggataggtcacggtggcgccgaccgcctcatagaccgcggcaccctgtctaaaggcgtgatcgcgcatcgcgacatcgttcggatggtcgtcgaaatgcacgctcgcgaccggcatgccgaacttgtccttgacgttcggatccagcgtgacgcggttggtctcctgcggcaggtcctcgccgaccagccacatgccggccatccgcggatagccttccatggcactggtgaagctgcggccccaagcgccgggattgaggaacgcggccatgaagggcagaccgagcgacagcgtttccatctcgtagccgccgacgaagccgcgcttcggatcgttcttcgcctcgtcgcggatgatgccggccatcgtggtgccgcgatacatgtgcaccgatttctcgaaggtcgcatacacgctgccggtcatgtgccgcagatagttgcggccgacctggccggatgagttggcgaggccgtcggggaacatgctggacgcgctgttgagcagcagccgcgggctctcgatcgagttgccggcgaccgcgaccacgcgggccttctggcgctgcatcgcgcccgtctcatcggcatagaccacgccggtcaccttgccggactgatcatgctcgatcttgatcaccatgctgcccgggcgcacctcgagattgccggtggcttcgcccttcgggatctcggtgtagagcgtcgaccatttggcgcccgacttgcagccctggaagcagaagccgatctgctggcacgagccgcggccgtcgcgcggttcgctgttgatggccatccgtccggtgtgcacctccttgtagccgagcttcttggcgccggcctccatcaccttgaaattgttgttgccgggcagtccgggaatgccgttggtgcgggtgacgcccatcttgttctcggccttggcgtaatagggctccatctcggcgagcgtgatcggccagtccaggagattggcgccggggatgttgccgtaagccgacttgatcttgaactcgtgctcgtcgaagcgcagcgaggcgccggcccagtgcacggtggagccgccgaccgccttgacgatccaggctggaatactcggaaagtccttgtgcacgcgccagcttccggaggtggtgcgggcgtcggaccacgcgagctggctgaagctgtcccattcatcgttgatgaagtcctggttctcgatgcgcgggccggcttccaggatcacgaccttgatgcccttctgcgccagttcattgccgagcgttccgccgccggcgccggagccgacgatcacgacgacgccgctgtcattcagatcgaattttgccattgtgtcctcccaaaattgtctggttcaggctttcggcagccagtcgatgtcggcgaagccgcgcttgatgtagccgccatgctcggccgaggagccctcgtagccgaaccgcggccagacctccttgttgttgtagagcgaggcgatgagatcgccgcggatctgctggaagaacgcgcttgtctcgatccgctgcagcagcgcgacgcgatcgttctcccaggcgacctgcgcataaggcatcttgtggcgctcgttggcctcctgatcgagccgggcgatgccctcattgatcagcgacttgaccgccgggtccttcgcggccttctcatcccagggcttgaccgccgtgatgtaatagctgtcgccgaggaaatcgtgcggatagatgtcgcgcgccatcttcaacagcgtcttcagcgtcgccggcgtcagcgtcgaggcgccttcggcccacgcatcggtgatgccgagcccggtcgatgtcgcgatcgcgacggcaggggcggtggcggctgcgcctttgagaaagacacgccggtcatatctgctgcgtcgatcgatttctctcatggtttcctccgtagtttattttctatttggatttgcaactggattagccgaagcgcccgccgcgctggatcacctcgatcttgtagccgtcgggatcggagacgaagaagaagcgcgccagcgtcctgccgtcatgcttgaagtcgcgcagcggcccgggcgacagcttctcctgctcgaagcgcgcgtgctcggcatcgacgtcatcgacgacgacggcgagatggccgtagccgtcgccgagcgtgtagggttccttgcggtcgaaattgaccgtgagctcgacctcgaacggcgaggacggatggcgcagatagatcagcgcgaaatcgggaaaacgcagattgtccgcgatctcgagcccgaacgcgcgacgatagaagtcgagcgctttggcctcgtcgaacacgcggatcatcgaatgcacgggtttcgccattcagttcagctccttcagataggcgatgatcatggcgcgggtttccggcttggcctgccgataggccatcacggcacccgggatcacctcttgcggattggtcagccaggcatcgagcttcgcatcgtcccagacgaaatcggccttggcgaagcccgcggaatatttgaagccgtcggcctggccggcatggcggccgacgaccttgtagagcgacggtccttgccggacgggatctgtcgcattcgatgtgtggcaggtcgcgcattgctgcttgaacagcgtggcgccatcgggcggcttggcggcgggcaggggcatttgcgcgcgcgcgatttgcactgcaagcattgcgctgcaaaatcccagcgccaacctcgccccggtcgtccacctcacgtgcagctttgtcatatacatcaccgcctctgtgccgtgactgtaggaggccgaaatccgccgttggtagtagcgggctgtttcacagcagaacaaagctgggcggcgatctggcgcggaaccggtcgttgccggttctgatgtcggatgcagcgccatgcgtgcgctgcatccacttcgctcgaaaacgctccagggtatgatccggaaaagtgcgaagcggttttccgaaaagatcatgcttaaacaagagtctaaagcgcgatgacgattcagcccgatctcatcgcgctttagtcgtcgaaacggcgcgtgccgcgaccggccttgatgtcgctgcggcgcttcttgccctcgaggcggcgttgcttggagccgaatgtcggcttggtcgcgcgccgtggcgtcggccgcaccatcgcttccctcaacatctccagcagccgctcgattgcgtcggcgcgattgcgctcctgggtgcggaagcggaacgcctggatcacgatcacgccgtccttggtcatgcggctgccggcgagccgcgccagccgctgcgcggcgtccggcggcagcgcgatcttcgtcgtgtcgaagcggagctgggctgcggtcgagaccttgttgacattctgtccgcccggaccggaggcgcgaacaaacacgatctcaatgtcgttctcgtcgatcgtaaggtcgcgggacacccgcagcatgacagcacccggtgcagggaagaatcggcggccgcaggatagcgggtttgtgttgcgtgtgcttggggtgcgtggatgccgcgcgtacgacatctgcggtcagagtccgcggctcacccctctccccaaccctaccccgcaaggggggagggagcccatccgccgatgcgtccctaacgatccaacgccaatcgaagcatcaccgccagccgtgacgtgatgtgaggtgagcgcgtctctcaggctccctccccccttgcgggggagggcggggagagggggggccacgacggcggtgtacgaagaaggagcgcgccgaaacgcttcagttcgccttcggcggcgccgacgccggctgcgcggcggcttgcggggcgcggccgacgatcacggtgagcaggccgttgccccacagccgcctggagacccgcttgacgtcgtcgagcgtcaccgcatcgacgatggcgctgcgcttctcgatgtagtcgatcggcagcttgtcgagctggtattgcagcatcgcctgcgcgagcttggaggaggtgtcgagcgccagcatctgcgagcccttcagataggacttcgcctcgtcgagctcctgctgcgtcgggccttgctcggcgatgcggcggatctccgcctcgaccgcatcgatggtctcgccggcgcggtcggcgcgggtgccggtgttgccgaggaacagcgcggagtggtccatccagagcagcgcctcgtagatcgaataggccagcccgcgcttctcgcgcacttccttgtagagccgcgacgacagcccaccgccgccgagaatgtggttcaccacataggcggccatgaaatccgggtcgtgccggttgatgccgggtccgccgaaggtgacgatggtctgcggcacatcgagcgggacaaaggcgcgctgcggcggtttggtcgccacgacgtcgggaatcggcgtcaattcggccttggccggcaggtcgccgaaggtcttgtcgagcagcttgccgagcgtgtcggcatcgacgtcgccgaccacggcgatccgcagcgtatccttggcgatgttgcggcggacatactccttcagatcggagatctcgatggtcggcacgctctcgagcgtgccggtcgccgtcctgccgtagggatgatcgccgaaagcgagctcgaggaacttgcggccggacagcgaggacggattggtcgattcgcggcgcaggttcgagatgacctgggcgcggatgcgttcgacgtccttcggctcgaaccgcggcgaggtcagcgccatccgcaacagatcgtaggcttcgtccttgttgtccttgagcatgcgcagcgagccgcggaactgatcgcggttcgacgcgaagctgagctcgatggcgcggcgttcgagccgctcatgataggtcttggaatcgagatcgccggagccctcatcgagcaggtcggcgaccagattgccgacgccgggcttgcccggtggatcctggctggcgccgccgccgaaggaatattccatcgcgatcagcggcacggtggcgtcctgcacgaaccaggcctcgatgccgccgggcgataccagccgctggatcttggcagcggcctgcgagggcacagacgtcagcgccagcatcgcggcgcaggcgccgccgatcagcgccgcgcggcgggtgagggagtaggtcacgagcgcttctcctcgcgtttcggcgcggtatccttgatcagatagccggtcaccgaccgcttcttgtcgagccaggtggcggcagcggcgcgcacctgctcggcggtgacggcgcgaatgcgatccggccagctgcggatgtcgtcgatgctgaggccggtggtcagcgcgccgccgtaccagcgcgccagcgtcgcctggttgtcctgggcgtagatcgcctcggcgatgagctgggtcttgacccgttcgagatcctcggcgcgcgccgggttctgcgcgaggtcggcgatcaccttgtcgatcgcgtcctcgatctgcgcgaactcgacgcccggcttcggcgtcaccgcgatcgagaattgcgaggggtcgagcgaggtgccctgatagccggcgccggccgagatcgcgaggcccttgtcgatcaccagcgcgcgatagaggtaggaattggcgccgccgcccatcaattgcgcgagcacgtcgagcgcctggctctcgccggccgccgctgtcgtcgccgagggcaccagatagtagcggcgcaggttcggctgctcgacccgcgggtccgacagcgtcacggtgcgcggggcggctggcgtcggctcctgcggccggacacgcttctcggggatcgcacgctgcgccgggatcgggccgaaattcttctcgaccagcggccggatatccttgacgtcgacatcgccggcgatgaccaggatcgcgttgttcggggcgtagaagcgccggtagaaggcgagcgcgtcctcacggtcgagcttctcgatctcctggtgccagccgatcaccggccggccgtagggatgattgagatagagcgcggccatgatctgctcggtgagccttgcatccgggttgttggcgacccgcatgttgaactcctccagcaccacgtcgcgctcgggcagcacattctcgtccttcaggatcaggccggtcatgcggtcggcctcgaattccatcatggaggcgagctgctcgcgcggtatgcgctggaagtagccggtgtagtcggtggaggtgaaggcgttctcgttaccgccgacgcgcagcacggtctgcgagaactcgccggccgggtgcttggcggtgcccttgaacatcagatgctcgaggaagtgcgcaaggcccgatttgccgggcgtctcgtcggccgagccgaccttgtaccagatcatctgggtcacgaccggcgtgcggtgatcggggatcaccaccacctgcaggccgttgtcgagcgcgaagctcgcagggcgttccgaggtgacggtggtctgggcgcggaggctggcgcccggcagcgggatcgttgaaatgagagcagcagcgaacagggcaatcgatcggcgtgtgggcatcatggtccttatgaaagcccggacacacagccggggcgcgaaagcaggccatcgtacacggtcgtctccgtgcccgtcgtcacgaagcggagagagcgacgccgcgccgcattaagctttgctcatgtcagccttcgcccgaccaggccaagcgtcattgcaacggttttccggtcatgacgtcgtattggccttcttgcgccttcggcttcatcggcccggtgccatagtcgaaccccgcggacggcgtctgatagccgggcggcggttcggtcagggattcgcgggtcggctcgcccttgaatggcttagactcgctgctgttgcccttgaacatgccgagcagaccgccggagtaaccgagctggctcggcatcaacgacggattggtgctcacaccgggctcgagcggctccttccggccgtcggtggcggtctgctgcttccgtccggcctcgatctcggccggcgtcaacgccaccgctgactgccacggctccttcttgacctctttcttgcgcgcctcgatcatggccttgcgcttggcgatgtcggggtccttcggccagttcggcgcgttgacctgggtggtcgaggcgggcggcggcaggtcgagcttcggcggcaccaccagcggcgagcgctcgcgatagtcgatgcccttgctggcggcgctcttggcgccgagcccggtcatcagattgtcgacgatccgctcttcgaaggtcaggccgtcatcttcatcttcatcttcgccggcgcgcaccggcccggcggccatgacgaggccgatcccggccgcaacgaacgcccaacgcaggccgcgcatcagcggcagccgcgacgtctcgatcagataaacgcgggctttgatgttgcgcatcgcgcttttcccatctcaaaattcgccaaagcgatcactggcttagcgctcagttccgctaggtgcaggtcggccgccgaccggctcatatcggccgggatcagggcgcttttacggcgggggtccccatcacggaatcatacaatagggccgccacgccagcaacgatcgccacatcggcgaggttgaagatgtaccaattgaaggtttttcccccgatctcgacatgaaacagggcaaaatcgaccaccgcgccataggcgaagcggtcgataccgttcccgatcgcgccgccgatgatcaggccgagcgaaactgtcgcaagccaggttcgcgaccgcgccatccagatcgccagcgcgatcacggcggcggccttgatcaccatcagcaggatctgggccgccggggtctcgctctggaaccagccgaaactgatgccgggattcatggcgagcaccaggtcgaagaacggcgtcaccgtcaccggggcgtggtgcgcgatgtcgaggatgtgaagcagccagagcttggaggcctggtcggcgatcagggtgatgaccgccgccagcacgccggcacgaacgggcgagctcaagccgtgacccccagcgccttccattcgcgcagcgcctgtgcgtcgcgcggcgagacgtcgggatattcgggatcctcgccaaccgtcggaaggatcttccacgagcgcgcgcatttggtgccgaccgccttctcgaccacgacggcaacgccgggcaccgcatcgagacggaaggcgctggccggcgcctcgccctcgcgcacctcgtagttcgaggtgatgcagacctcggcgagatcgacgtcgaacagcgtcgcgagcatgtcgcggtcggcaacatagatcaccggcgaggcttccagcgacgagccgatggtcttgtccttgcgctccagttcgagcgcgccggtgacgacacggcggacgtcgcggatcgtctcccacttcgcggcgagggcgtcgtcgcggaattgctcgagtctgtccgggaacagcgtgagatgcaccgaaggctcggcgcccggccggtacatccgccaggcttcgtctgacgtgaagctcaggatcggcgccagccatttcaggatcgcgtcgcacaggatgtcgatcgtggtcagtgccgccttgcgcgccaccgaggacggcggatcgcaatacagcgtgtccttgcggatatcgaaatagaacgccgacaattcggaattcatgaaggccgcgaggctcgcgaccacggtcttgtagtcgaatgcggcataggcgttgcggatggtctctgcgtggccggccagctcatgcagcatcagccgctcgagctcgggcatctcggcaaagccgaccttctcggcttgcttgaaatgatgcagcgtgccgagcatccagcggatcgagttgcgcagcttgcgataggtctcgacggtgttcttcaggatctccgggccgatgcgctgatcgtcggcatagtcggtggcgcacacccacagccgcaggatatccgcgccggaatttgcgatcacgtcctgcggctggaccgtgttgccgagcgacttcgacatcttgcggccgttctcgtcgagcgtgaaaccgtgggtgagcacgatgtcatacggtgcgcggccgcgcgtgccggcgctttccagcagcgaggagtggaaccagccgcgatgctggtcggagccttcgagatacatcacggtgtcgttgccgccatcgaccttgcggacgatgttgccgagctgcgggaagttctggcggtcttccagcacgaaggcgtgggtggagccggaatcgaaccagacgtcacagatgtcgtcgaccttcttccagtcctcggacgcgcgcgagccgaggaagcgctcgcgggcgccgtccatgtaccaggcgtcggcgccttcctccatgaaggcctcgctgatgcgctgattgacgacctcgtcctgcaggatctcggccgagccgtcagcgttctcgcgcacgaacacggcgatcggcacgccccaggcgcgctgccgcgagatcacccagtcgggccggttggcgatcatgccgttgatgcggttctcgccggccggcggcacccattgcgtgaccgagatcgcgtgcagcgcgcgagcgcgcagcgtgtcgcccttcttcgcgtggccgttctccgcgatgtccttgtccatcgcgatgaaccattgcggcgtgttgcggaagatcaccggcttcttggaacgccaggaatgcggatattggtgcttgaggctgccgcgtgcgagcagcttgccgccttcaatcaacgccttgatcacggcgtcgttggcgtcgcccttctcgccctcgtcggtcagcacgcgtttgccggtgaagccgggggcctgcgcggtgtaggtgccgttttcgtcgaccgtataggggatcgccgtgttgatgccgcgtgcatccagctcgcgcttgttcgccatccagacgtcgaagtcctcgcggccgtggcttggcgcagtgtgcacgaagccggttccggtgtcgtcggtgacgtgttctccggcgagcaggggcacggtgaattcgtagccgccgctgaaaccgcgcagcggatgcgcacattccacgacatcgagcgtatcgccggggatgtcgcgcaccctctcataggcggcgacgcgcgccttcttgaacacttccgccgcgagcgcgtcggccaggatcagcaggtcgcccgtcttcgcccatttggcttccggcgcgtcggttaccttgtagaggccgtaggcgatcttcggcgagaacgagatcgcgcggttgccgggcagcgtccacggcgtggtggtccagatcacgaccgaggcattggccagcgcgccatgcgccggcgaggtgaccgggaatttcacccacaccatgtcggaagtgtagtcctcatactcgacctcggcctccgcgagcgcggtcttctcgaccacgctccacatcaccggcttggagccgcgatagagcgtgccgttggcggcgaacttcatcagctcgcgggcgatctgcgcctcggccgggtagctcatggtctggtagggatggtcccagtcgccgatgatgccgagccgcttgaactcctcgcgctgcacgttgatccagtgcgtcgcataggcgcggcattcccggcggaacgcgaccatcgcggcggagtcgcggaaatcgggcttctgcttgcccttggagcggtagttctcctcctcgatcttccattcgatcggcaggccgtggcagtcccaccccggcacgtaattggagtcgaaaccgagcatctgctggctcttggtcacgacgtccttgaggatcttgttcagcgcgtgcccgatatggatgttgccgttggcatagggcgggccgtcatgcagcacgaatttggcgcggccctcggcggcccggcgcagtctgtcgtagaggccgatctcgttccagtatttgaggatttccggctcgcgctggggcaggccggcgcgcatctggaattccgtcttcggcaggtaaagggtcttggaatagtcgttagcgtcggtcttttgcggcttgtcggacatgaaggctctgatctggcaggtgagggcgcggaaacgcgatcaatcgcgggtgaaacgacgaaatcccggtcttgcgccgagccctcgggctcaggcggaagccgggccgctaatccgtatgatgcgccgcgaaaacatcgggtttccttagcagccggacggggaattcgcaaagcccccggtggccggcggaccgttccgcgggacggcccctaaagcgggataggttgagctggagcggcggcggaggtgccacctctcccttgggagaggtcgatttgcgcagcaaatcgggtgagggtttgcggtctatcgagagaacaagagccctcacccggcgctgcgcgccgacctctccccacgggggagaggtggaccaaacccgcggtcaaactgatctaacctcttcatcccgcgctaggcagccgccgccgggccggatttccggccacgatggtgccggcggcgacgtcccgcgtcaccacgctgccggccccgaccagggcgccgtcgccgattgtgacgccgggcaggatgatggcgccgccgccgatccagacgtcgctgccgatccggatcgggcggccgaattccagcccggcgcggcgggtttcggcatcgcgcgggtggtcagcggtgtagatctgcaccgctggcccgatctgggtgcggtcgccgatcacgacctcgacgacgtcgaggatgacgcagttgaagttgaggaacacgccgtcgccgaggctgatattgctgccgtagtcgcagaagaacggcgggcggatgatggtgtccttgccgaccttgcggaagcgctcggagagcagcgcgttcagttcggccgcggacgatgcgcccgacgcattgtagcgggtcatccagcgttccgccgcggcatggtcggcggcgatctcggcatccgggcgatacagctcgcccgccagcatcttttgcttttcagtcttgttcaatcaatcgttccgagtcttggaaacgcgtccggcgcggcggcgaggtacgcgcgcgccttggcgctgtcgtcatccatctggcgtatcaacgcctcgatggtgtcgaatttcagctcttcgcgaatgaaaccgatgaatgcgacatcgaggaccgtgtcgtacaggtcgcccttgaagtcgaacaggaacacttcgagcagcggcgcgccgttgtcgaaggtcggccggcgcccgaagcttgcgacgccgtcgaaccgctgcgcgcccttgccgatccgcaccgcatagatgccgtgcttcaggccgcaatgcttgtcgaggcggatgttggcggtgggatagccgaggtcgcggccgcgcttctcgccgtggatcaccttgccggtgacgaaccacggtccgcccagcatcgtggtggcgtcggtgacctcgccctcggcgagcgccatgcggatggcgctggaggacaccgggcgctcggcgatgtcgacatgggcctgcacatcgacctcgatgccgagccgcggagcctcgctaaccaaaagacttggcgagccgacccggcccttgccgaaatggaagtcgtagccgaccgcaatgccgctgatgccgagccggcggatcaggtcatggtgaatgaaatcctgcgccgacgtaccggcccgcgccttgtcgaaggtcatgacgacggcgccggcgagcccggtggctgcgagcaagcgcagcttgttggtctcgtccgtgaggcggaattgcggggtgttcgggctgaagaagctgcgtggatgcggctcgaaggtcacggcgagcgcgggcacgccgcgcgctcggcccatcgccagcgccgcaccgatcacggcgcggtgaccgagatggacgccgtcgaaatttcccatcgcgaccacggcgcccctggggatggcgctttcgggggtgttgtcgcggataacggtaaagccggtgctcatgtcaggtattcttcaaggattcttaagcatgattgttgcgggccggaccgtgacgcggcggcggcgtggaagtcaagcgtagcgaaaatcgcgtcaaatccgtaacaatccggattcagccggttaacgcgctgtttaacgccagctgttactcgttgccggaaacctgcgttcgtgcagaagccaagttgcgtcaggcgttttgggggaaaagatggcggttgatttgtccatgccggttctggtggttgatgattacagcaccatgatccgcatcatccggaatcttctcaagcagcttggattcgagaatatcgacgatgcgtccgacggctccgcggcgctcaacaagatgcgcggcaagaagtatggcctggtgatttccgactggaacatggagccgatgaccggctacgacctgctcaaggaagttcgcgccgatcccaatctcgcgaccacgcccttcatcatgatcaccgcggaatccaagaccgagaacgtgatcgcggccaagaaggccggcgtcaacaactacatcgtcaagccgttcaacgccgccacgctgaagaccaagatcgaggcggtgttcccggacatggcgaccgcgtaagacgctcgtccatcgcatctactgaattcacgttatgcccgggctagtcccgggcatagctgtttttcgccaaggcaagatgagattaggctcagccgcaacggcgtcggaagttcacctctcccttgggagaggtcgatttgcgtagcaaatcgggtgaggggggacggtctatcgagggagcaagagccctcacccggattgctccgcaatccgacctctccccgccggggagaggtgaaccgcgaccagaggctcgcgcaaatgccatatgcgataactcctgcggcgaagtgcgtctgcgctatttcggaatattagaagtatgcccctgagttgcccgacgtgtcaaggcgaccggtcgaacatccggtgccgcggccactttgcatggggttgttttcgatattttggcagcgcgccgcttgcggagccggccgctaccacttcagctcgcgcatcagcgcgcgcggcgggtggccgaacaattccttgatcgaggccggatcgagctgctcgatgccctcgaactgctcggaatggatgccgcgggtgatgaacaagagatcgatgccgaagccatgggcgccggtgagatcggtgcgcacggaatcgccgatcgcaagcacgcggccgagctcggtcgggcggccgcggcgctcggcggccagagccatggcgcgctcgtagatcggccggtgcggcttgccgtagaagatcacctcgccgccgagctcgtgatagagttcggcgatcgcgccggcgcagtagatcagccggtcgccgcgctcgaccacgatatccggattggcgcagaccagtgtgagcttgcgcgcgagcgccttgagcagcgtgtcgcgataatcctcggcggattcggtttcgtcgtcgaacaggccggtgcagatgatgtagtcggcctgctccagcggcaccatggtggcgtcgaggccgcgatggatcgagctgtcgcgctcggggccgatccagaagatcttctggccgggatgatcggccacgaagtggcgggtcaggtcgcccgaggagacgatcgcgtcataggtctcgtccgcgacaccgagcttgcgcagctggcgctgcaccgaatcggccggccgcggcgcgttggtgatcaggatcaccgtgccgccctgcttgcggaatgtgtgcagggcctcgcaggcctcgggaaacgactcgagcccgttgtgcacgacgccccagatgtccgacagcacgacgtcgacatcgccgacgaggtcgcgcaattgctcgacgaagcgcaatgacgtcatgatgcaggccgttgactagttaggaccgagggcgcggcgcgccagcgcggcgctgccggttgcgcgcggcggcgctgttgggctggtgacaggtgctgaagggccggcgccattgaggtcctgggggttggcctgcggagcctcggcggtagcagatgccccctccggccgcaacggtcgcggcggcgcgaacaggaagccctggccgaaccggacatcgtagtcgagcaggtcgaccaccgagcgctcgccctcgatccgttcggcgatcaggtcgatgccgaagcggccgagcaggtcggacagatcggacggatggatgtccgacgtcgcgctctgcctggtgtcgagcagcaatgcggccggcaccttgatgaagcggacgccgcgatcggcgagctcgcgcggttcgaggcggaggtcgctgacatggtcgatcgagaaccggtagccgcgctgcgatagcgccgcgaggttctcgctctcgaccgggccgagattgcggaaggtcgcctgcttgaactcgagcacgaaggacggcgccagcgcgcggttggcctcgagaaaatcgaggcactgggtgaaatgcgccggactggccagcgtcgccgccgacacgttgcagaacacgccgacatccttgctgcggatcatcaggcggcgcagcacctggacgcagcgaagcatcaccatgtgatcgatgcggccgatcaggccggcggactcggcggcttcgatgaaatcgtcggcggcaagcacctggtcgcgctcatcgcgcagccgcgtcaccgcctcgtaatagcgcaccttgcgctgcggcagcgtcaccatcggctgcaggtagatgtcgagccggttctcgtcgatcgcgtgcctgatcgcgccgacgagctgggcctggctgcgcgagatcggctgcggcggcgcagctggcggcggtggcgcgaacacgacggtcgcggccggcgcgaccggctgcaacagatcgtcgcgcagcgaagcgaccggctgcgccacgggagccgctgccagcagatcctcatgatgggcgacggatgccgcgagctgccgcaccagtccgccgagctcgttgatctcgccggccatgccctgcatccggtcggcgccggtggaattggccgacgtgacccggccctcgactgcggccagccggcggccgaattcagcgacctggcgggcgaggtctgcggtgccgcgcgacagatccgcgatctggccgccgacatcgctgcggtcgcgcagccgcatcgagagggcgttgtagaggatcaggcaggtgagggcggtgagcgccacgatcgccgattccgatccgctgatgcccgccaccgaatacagcacgaagccgagcgaggctgcgaccagcaccatgcagatggcgatgaagatcgtcgaaatgcgaatcatgtcgcgcgcccgcgccctccgtccgaacatccccggcgcgcaagcttagcaccattgttgattcgacgggcctgcgatcttcggaaccggctggaactgcacacgattttcgcttcgcttggtccggctccgcggccgggctccgtagtcgtccggatcggccgcggcgggccgctcagaggtcggcggcggcgatccagaacacctcgccctcggagtcctcggtgtcgagccagagcagcggcaggttcggataggcggcctcgagattgtcgcggccgcggccgatctcgcagagcagtccaccctgcggggtgagatgctgcttcgcctcgtcaagcaggcggcggacgatgtcgagcccgtcaggcccgccgtcgaacgcgatcttcggctcggcgcggcactcgcgcggcagcgaggccatgccttcggcgtcgacatagggcggattcgagatgatgagatcgtagctgttgtcgccgagcggcttgaacagatcgccgcgatacagtgtcaggcggtcgtcgaggccgtggtcggcgacgttgcgcgcggcgacctcgagtgcatcctttgagatatcgactgcatcgacggcggcattggcgaaatgccgggcggccaggatcgcaaggcagccggagccggtgcagaggtcgagcacgctttcgacctccgcgggatcgccgatcagcgaggtgccgtcttcgtcgccgccgaaatgcgaatccagcaattcgccgatgaaggaacgcggcacgatggtgcgctcgtcgacatagaacggcaggccgcgcatatagaccttgttgacgagataggcggccggcttgcgcgtcgcgatccggcgctcgatcaggtcgaggatctgcttgccctcggccagcgtgacgcgcgcggtcgcgaaattctcgaactggtcgggatgcagatgcagcgtctcagcgatcaggaacgcggcttcggcgatgggatcagtggtgccgtgcgcgaacaccagtttggccgcgttgaagcggctcaccgcgtagcgcaggaaatcgaacagggtgtggagctcgcccgcgccgaccttcggcacttttgacgcgacagggctgcgtctggccggcactttgctgcgcttggccatcaggatttggtccagcgcgcggcagccgcgtcgtcatggtcgcgcgcctcgatccagctcgtgccgcgggcgctttcctcgcgcttccagaacggcgcgttggtcttgagatagtccatcaggaactcggcagcttcgaatgcggcctgccggtgcgccgaggcggtcacgaccagcacgatgttctcgcccggcgcgatgcggccgaagcgatggatgacggtgaggccctgcaacggccagcgcgccagcgcctcgtcggcgtggcgtccaatctcggcttccgccatttcaggataatgttcgagcgtcagggctgcgatcggctcgccctgctcgctgccgcggcagatgccgctgaagctgacgaccgcgccgacatcggtgcggcccttgctgaggccggcgatctcctgcgcgacgtcgaagtcggctcgctggatacggatggtcgcagtaacagccatgattggatctagccgccggtcatcggcggaaagaacgcgatctcgcgggcgccgatgatcgccgcatcctgcttgacatgggcgtggtcgatcgcggcgcggatcaccgtgggcttctcgaaggcatgggcgtaggcatcgtcgcgcgcggtgagccagccgatcaggtcggcgacggtgcgcacctcggcgggcggctcgacggtttcctccgccttgccgacgcgctctcgcacccaggcaaaatatttcagcttcatccctcatcctccttgatgaggtgatggatgccggcgcggaagtaatcccagccggtgtagatcgtgaagatcgccgacatccacagcagcacgatgccgatcagggtggttgccgggaacacctgctcgcccgcctcgccggcgatcagaaagccgatcgcgaccagctggatcgtcgtcttccatttcgcaagcttggtgacgggaacgctgaccctgagccccgcgagatattcgcgcaggcccgagaccaggatctcgcggcacaggatcacgatcgccgcccacagcgtccagccgtggatcgaattgtcggcggccagcatcaagaggctggaggccaccagcagcttgtcggcgatcggatcgagcatccggccgaacgcggactgctggtcccacatccgggcgtaatagccgtcgagatagtcggtgatccccgccgcgatgaacacggcaagcgccacccagcgcagccacaacgggccgtccaggatcgactgccagtagacgcagccgatcaccaccggaatggcggcaatccgggcgtaggtcaggatattcgggagggacatggtcttggtctgtccccgggtcgtagcgatgttcatccgttctaccaataccgctgaagcgagaaggtcaaccgtgcgggcgccaaagcgcggcaacattacgcggaatcgtcatggcgccttagctcgttgtttaggcgtgatcttttcggaacgttgcctgacactttccgcatcatgccccagatgccctgtcgcaggcgacgccctgatgaatagcctttggtttaacccggctgggcgtggaaaaactcgaaaatcttgcgggcgctctcggcactgacgccgggaaccttgccgaggtcggcgatcgaggcccgctcgatctccttgagcgttccgaagtggtgcagcaaggcacgttttcgcgacgggccgatccccgggatctcctgcaggccggcctcgcggatgtccttcttgcgcagcttgcggtgcgagccgatcacgaagcggtgggcctcgtcgcgcagccgctggatgaaatacagcaccgggtcgcgcggctccagcttgatggcctcgcggtccggcatgaacagggtttcgcgcccggcatcgcggtccggccccttggcgaccgacatcagcgcgacctgggtgagcccgagtttctcgaaaatttccctgaccgcgttgagctggccgcgaccgccgtcgatgatgaccagatcgggccattgcggaaacgactcgtcgtccgccttgtcgctctctcgggccttcgcgccgtccttggcggcctcgccctccggcggcttcacgagtcgcttgaaacggcgctccagcacctcgcgcatcatcccgtaatcgtcgccgggcgtcagcccttcggacttgatgttgaacttgcggtactggttcttcatgaacccgtcgggcccggccacgatcatcgcaccgaccgcgttggtgccctggatgtggctgttgtcgtagacctcgatgcgctttggcgtgtgcggcaggccgagcgtcgtgaccatgccctccagcagccggctctgcgtcgcggtgtcggcgagcttgcggccgagcgcctcgcgcgcgttggtgagcgcgtggccgatcagctccttcttctcgccgcgcttcggcactgagacctcgaccttggagccggccttgaccgagagcgcgtcggcgagcagcgcgctttcctcgatctcgtgcgacagcaggatcagcttcggcggcggcttgtcgtcgtagaattgcgcgaggaaggaggacagcacctcctccggcgtgaaactcttctcggccttcgggaaataggcgcggttgccccagttctggccggtgcggaagaagaagacctcgacgcaggaatagccgccctcctggtggatcgcgaacacgtcggcctcttcgaccgtgcgcggattgatgccctgttgcgactggatcgccgacagcgccgctaggcgatcgcggtacagcgccgcggtctcgaattcgagctcgccggaggccttctccatctcggccgcgagcaattccttcaccgcgtggctgcggccggacaggaattcggtcgcctcgcgcaccagttcgctatagccggggaaatcgatctcgcgggtgcaggggcctgcacagcgcttgatctgatagagcaggcagggccgggtgcggctttcgaagaagccgtcggtgcaggagcggatcaggaacgcgcgttgcagcgccgtgatggtgcggttgaccgcgcccgcattggcgaacgggccgaaatagcggccgggtcgcgactgcgcgccgcgatgcttgaggatctgcggtgcccagtggtcgccagagatcagaatatatggaaacgatttgtcatcgcgcagctgcacattgaaacgcggccgcagctgcttgatcagattggcttcgagcagcagcgcctcggtctcggtcatggtcgagacgatctcgacatgggtggtcgccgcgatcatgcgcaggatgcgcgccgccaatggcgcgttggcccgcgcataggacgacagccgctttttgacgttcttcgccttgccgacatagagcacgtcgttggcggcgttgagcatgcggtagacgccgggcgaggtcggggcgagccgcaccgcgttctcgatcgcggcatgcccgaccgagagcgtcccctcggcgaccggctcggcgccgtcctccgaagcctcgggcagacgtgcctcgtcgtcctcctcggcggcggagctttcgggatcgacgtcgctcgtgtcgagcgtcaggtcggcctttgtcaggtcgtcctgcggcagatcggactttgcgccgcgccctgtcttctgaggcggcatcggacgttcgggagaatcgtgcaccatgggccgtaaattaatcgcttgggcgaccgctcgccagcgtcggcggctcaggaaaaagaacccgattgcagcaggttacaggttgcgcgccaccgccgccgcggggcggtaacacattgttaagactgatgagcgggccggtaaccgggcttaacagccctttaacttaaaactctcgataaaccttagcgaaaaaagtggaattccgtaaccacgcaggcttggggcctgcgggctgcggcagttgcgtggtggagagtagctatgacccggtttgttgcgcgtgcgctggcattgatcgtcgcaggctggacgacctcggcggcggcggccgacctcaactacggctcgccctatacggtctatcagccgctcaatgcctatagctgggccggcccctatctcggcggcaacgtcggctacggctggggttcggtcgagaacaacccgacccagccgtccggcttcgtcggcggcgtgcaggccggctacaacttccagaacggctcaccctgggtgtttggtatcgaagccgatatccagggcacgacggccgatgatcggttcgcgccctggaaattctccaatccgtggttcggcacggtgcgcggccgcgccggctacgccgtcaacaacgtgctgttctacgcgaccggcggtctcgcctttggcgaacttcgcggcgagaccttcggcgtgtcggagacgcacaccaatgcgggcttcaccgtcggcgccggcgccgaaatgggctttgctccgaactggagcgccaagatcgagtatctctacgtcgatctcgccaacagcaacttcacgatcaccggcggtgcgtcgaacggctacagtttcagcctggttcgcgccggcatcaactatcacttctgagaacaagaaaacgtctgacatcaactcccggccgcgcctcgcgcggccgggtttttctttgtgctgacggtctgcacatcgcgcgcagcagcatgcacgccgccccattcgcgaagccgatcgtcggccgcacgcttcgagcgtgcggcacggccagtcgcgtccgcatcatgcagggtggtcatgaagcgagcgcgcgccgcgcgctcggcagtcaactcacatgcaacgcttcagtcggtgttcatcacgagccgcgcactgcaagcactcatcatgaaaccaccaggttgaccgccttcgggcccttgcccttcttgtccggctcaacctcgaacgtaatgcgttgtccttcagtcaggtccttcaatcctgcacgttcgacagctgtgatgtgaacgaacacatcgcggccgccatcatcaggcttgatgaagccgtagccacgctctccgttgaagaacttgactgtcccagtcatggccatcgggaaactcctcccccgtattgctccaccgctacgcgcacgtcgcgtagcggttgaccgacattcgcttgtcggaagcttggccacctgaacaggccggcgtcacgccgctggtctgcctggattttatttcggccttgtcactccgccgcaaccattcgcggaagcggaacgtaaagccagtcgtaacaggatgagcataatacggttccgcgcaaattgcctatgctcaaatttgaacttttcagtgggtgcttttcgatcaagctttaggcgtctctaatctgaagcgcgcggcgccgccctgaccgagtggcttctcgagttcgggcaggatgatcttcagctcgttggcgagtgtccacggcggattcactatcaaaagtccggtagaaacgagccctgcgtccgcttcttgcggcgccacactgaattccagacgcaagcatttgcctgcgggccggctgctcattgctgcagcagccacgctgcgtgcgagctcgtcggtggctctccgggtttttacggggtaccacaaaagatatgcgccggtcggccatttcgcgaacgcctccgtgaaggcacgggccagtcgctcgaactcgtcctttgcttcgaacggcggatcgatcagcacgaggcctcgccgctcgttcggcggcacgaatgcgggcagcgccatccagccgtcgagatcgacgacacgtgcctgtgcgtcgcgtcgcaatgcatcgatcaattgcttgcgcgcgccgagctcgagctcgcaggccgtcagacgatcttgcggacgcagcagcgctcgcgcgatcagcggcgatcccggataggctttcaattcgccgcgcggattgaacgccctgacgatgtcgagatagggcccgatcaagggctgtgccttgtcggaaagccgcgcctgcatcagtcgcgcgatcccggtgagccattcgccgccgcgctgcgcttcgctcgacgtcaaatcatagaggccggcgccggcgtgggtgtcgatgacgcggaacggcgcctgcttctcctgcagataggtgagcatgcgcaccagcacgatgtgcttgatgacgtcggcaaagctgccggcatgaaaggcgtgacggtagttcatgctgttatcgctgcgctccggaagggagcgcatgttgtacttcgtcatgcccggcctgtcccggccttcgctgaagctttggcgggattaacatccgagcccggcgcagccttggcgtagctggctcccgcgcatcgacgcctgatcttgctggtttcgcgatggcgcggatcgccgggtcagtccggcgcgacgcatgtctacccggccatgaccgggaaggggtcagccgccgcgaaccggcggcatcagcacctgatcgcgacggcaggcgcggcgatcgatttcctcgcaggcgcggaattgcaagtccttgctgaggcaaatccgcacctcgctgagccggttactggcgcaggtgaccgagatcgcggagttgctgagccccggattggccttgatgaaggcggtctccaactcgtcgggcgcgatcgtcttcggctccgacaattgcaggaattcctcggggatcttcaccgtagcgcgggccttgcggatggcttcgaaatagccgcgctcgccgaggcccgagcaggtgccgtgcttgtcccactcgttgtagatcagcccgggtgccggcatcaggtcgagcatcgaggtcatgatgttgcgggcgagccgcggcgaggggcgttggcagtattccgggaagccgcgctcatattgtggccacagcccgtgcaccacgaaggagtacggccggccgccgcactgcgcctgcgtcccgcggctgttgttgccgcgctcgctcgccgcctcgcagaacgacggcgaccacgacagcgacagcacgtagaaatcgaattcgccgggcgcattctggcgacgatcctgggccgaggccccaaccgcgccacagagaaccaagacagcggaaatcagaaatcgggaaattgtgtccagccgaggcatcaaacgctcccctcacgcgaccgttcggagcctagcaggctcgcggaacatttcaagaacaaaagccgccggctatgtcggcggcggcttctgcttcagcaatccgtgggaaaatcagggccgggcggccttgcaggacgggttgtacgcccagttgcggtcgagcccggcgacgcaccattcgacgccctggtcgatgccggcaaagccgccgtcctcgatgatcgaatagtgtaccttgcgcaccttgccgtcgctcaacagcgcatcacccgagcagtagcggcgcgggatgttgtcggactgccaggggcggaacgcggtttcgtggatccggctgaagccggtgatgacgagcggcgaattccagaaggtggcctccttctcatggaattgatcgctgatggcccccagggccttctcgcatggcgccacgttgccgtcatagcgcgggcccgacagccagaaattcaactcgaacggattggccgcctgggccgtagtacccccgaaagccagcatgccgaccaggattgcggcaccgagaccaagcctaggtccgagtttgttgcgggagttgaacaggttgcgcatgggaatccacccgattgtccgatgcggcggacggtgccgcgaagccccggcaaggtcaagtgcagcgcggcaacacctgcggagaagtccacctttagccgccggcgtgttcttttcaccgtcgccgtcgcactctatgttggcgtcaagcgaaatggagtctgcgatgcgaaggaaattggccgcgtgcctggttgccgttagcgggatgctggccgttggtccggcgcaagccgactggttgcagccggtgccgccgttcaagggcaatgataccggcgggatcatcgcctattcactggcaacccagaccgacgcccggcagctcgccgtcgatcactgcgcctcctacggcaaggtcgtcaaattcctcgcgctgcagcgctatccgggcggctacatctcgttcgcctgccgctgggtgccctatggctcggcgcagcggccggtgcgcacactctactgagcgcctcaaaatccctcgatcgttcagccgggagctcgccgcatgacccgacagcttgccttgcttggctctgccgtttgcctcgtcctgtccaccggcgccgcaagcgccgttgacctgccgatccgcaaggccggtctgtgggaaatgaagatggtccgcaccggtgggcaaatcccggaggtgaccatgcagcattgcaccgacgagaccaccgacaaggacatgagcaccgcggcctctccgttggcaaagcaggtctgctccaagcaggacgtccagaagacggcgaccggttatgtcagcgacagcgtttgcggcgtcgccggcgtcaacgtgacctcgcattccgagatcaccggcgacttcaattcggcctatacggtcaagagcacctcgcattccgaaggcggcacctccggcgcccacgacgccaccatgatcatcgaggcgaaatggctcggcgcctgcaagagcgaccagaagcccggtgacatcatcatgcccggtggcatgaagatgaacatcaaggacatggaaaagctgaagggcctgctgcccaagcagaagtaggactgcgccttcgatcgctgcccgcgcgttcgagcacggcctctcacatgcggagaggccgtattgctttgcgccaccatcattgccgagggctcgccacaagactgcaaagcaattctgcgctgaaacggcgcgcagtccatctgatccttccccatcaccctgaggagcgccaccgggtccgcgcgaagcgcggcccgatgacaggctccgcgcgtcgcgaaaggtcgacggcccgactggtggccgcgcatccttcgaggctcgcccagcggcgcaattgcgccgcaaggctcgcacctccagcgacaaaggcgaagcctttgcgcggggatgacggatcccaccgctcgttcgcatcatccattggtgcgatgacgtcgacggagcgcgacatcgtcgaacgatcgttgcgtacctcacactcgggatgatctgagagaatgtggacgcgtatcgaatgcgtcgcgatgcatgcgtgctgctgcgtctcgctttgaatcgttccagcattgcacatcttgaatcgctccaatcttgcgcatcgtgcgtgcttcaagcgattctattttgcacgtgtggaatttcgccgatcccgtcgatagaagtccgccccattcgatgtcgcgcaatgacgaacacgcggctcgatcaagatcagtctgggggatgtgttcggtgggaatgacttcgtcgtggagcaggcgcagcttgctcgcatcaacagctgcgatcaacgcagcgtttctcggttcggtgatgcttgtgccggtgtgcgcagacatcgccagcgctcaggcgcaaaccagtcctccgcaaaacgatgtcagcgtgcttccgccggtgacggtggagcaacccggcgctgcaagaaagcgcagtgccgccgcttcgacgcagaacaccagggcttcgcgcgcggccgctgtgaatcgacgcggcattgccgcggcgcctgcgccgagccaggcttcgcgctcgcaagctgccgccggcgcgatcggtacgacgaccggttacgtcgcaaccggcagcacggccggcaccaagaccagcacggcgctgatcgagacgcctcagtcgctctcggtcgtcacgcaaaaggagctcagggatcgcaacgttcagacgctcaaggacgccgtcaattacacgcccggcgtgacaaccacggcgttcggctacgatccgcggttcgacagtttctacatccggggcttcgatgccacctataccgggatctatcgcgacggcctgcgccagggcggcggcaacttcgccattcccaagatcgagccttacggtctcgacagcgtgtcgatcctgcgcggcccggcctcgggcctctatggccttggctctccgggaggcatcgtcgatgtcaccaccaagcggccgacgttaacgccgttcggcgaggtgcagctgcaggccggcaactatgatcgctatcagggcagtttcgatctcggtggtccggtgcctggcagcgatcagctgtactaccggctgaccggtctgcttcgtgacgccaagacctggtatcccggcaacgacgacgatcgcacctatatcgcgccggcggtgacctggcggccggacgccgacacgtcgttcacgatcctcagcgaatatcaaagcagccggaccgccgctagcatcggcaacttccgtacgcccgagggacaattgaccaacgtctactcgaacgatccggccttcagcgcgatggatcagaagcagtaccgcatcggctatgcgttcgagcacagtgtcgacgacgtctggacggtgcgacagaatttccgcttctatcaggtcgacaccgatgcgcgatacacgcaggtcgattcgatcgatagcagcaccaatctcgcgtcgcgctccgcctggcggatcctggatagcttcaacacggtgacgctcgacaaccaggccgaggccaagttcacgctcggcgcgatcaggaacacggcgctgttcggcgtcgactacgggcactccacctacaacgacaagatcggctccgggccggctccggatctcaatcttttgacgatgaactacggcgctcaggccatcgcgacgccggccttctcaaccttcaacaagcagtcgaccgacgaggtcggcgtctacgcgcaggagcaggccaagcttggcggcttcgttctgacgctcaacggccgccagagctgggtgtcgcagaccacgacggccggtctcgacggcgtgccgtcgacgcagaaggtcgccgctttcaccggccgcgcgggcctcgcttacgttttcgacagcggcatcgcgccctatgtcagctacgcgacgtcattcgccccgcaggtcggcgtcgacgtatccgggacaccattcaagccgaccaccggcgagcagaaggaaatcggcatcaagtaccagatgccgcaagttccggtgttgctgactgccgcggtgttcgacatcacccaggacaatgtgctgcgcaccgatcccaacagcatggcgttccaggcggccaccgggcaggtcgagtccaagggcgtcgagctcgaggcgaagctcgcgctgaagcagggattcgatctcaccgcggcctacacccatctcaacgtcgtgatcatgcagggcaatcccgataccacgggcaatgagctgtccggcattccgcgaaattccttcgccgccttcggcaaatacaccttccagtccggcgtccccgtcgaagggctcgggctcggcctcggtgtccgttacatcgggaccaacttcggcaacgaccagaacacgttccagaatgcggcgacgacgttgttcgatgccgtgatcgattacgatctgggcaggctggatcggcgcttcctcggcgccaccatgcggctgaatgcgaccaatctgttcgacaagcactaccagacctgccagtccggctactgctatgccggcgagcggcgtcaggtgatcggcaccttgtcgtaccgctggtaagctaaagcggtatgagttttggtcgaagcggcctagcccggtcttggttcacctctccccgtcggggagaggtcggattgcgaagcaatccgggtgagggctcttgctttcgcgatagaccgtaaaccctcacccgatttgctgcgcaaatcgacctctcccaagggagaggtgaaccttcaacgccgttccagctcaacctaatctcatcatgctttagaccggcacccgcaccgcggcgcgcagcccgcccatcgggctctcgctgagcaggatgtcgccgccatgcgagcgcgcgatgtcgcgggcgatcgcaagcccgaggccgctgccgccttcatcctggttgcgggcatcgtcgagccgcaggaacggcttgaacacttcctcgcgcatgtcggcggggatgccggggccgtcatcgtcgatcgtgatgttgaggtagcggtggtcgcgctggccggtgatcgagatcgtgttggcgtggcgcgccgcgttggagacgaggttggcgaggcagcgcttgaacgaagccggcttcaccgtgacgaccggcaggccgtggaatgcgacggttgcggtgtggccgtggcgctcggcgtcgctgcgcagctcctccagcgccatcgccatgtcggtcggttgcgcgacctcgccggaatcgccgcgcgcgaaggcgaggtagtcttccagcatcatcgacatctcgtcgacgtccttgcgcatcgcgtcgatctcggggccttcgccgatcagggccagctcgagcttgaagcgggtcaggatggtgcgcagatcgtgcgacacgccggccagcatcgcggtgcgctgctcgatcgagcgctcgacgcgcgccttcatctcgatgaaggcctgcgccgcgcgccgcacctcgcgcgcgccgcgcggccggaagttcggcgcctcgcggcccttgccgaagctctcggcagcgtcggcgagccgcaggatcggcttgatctggttgcgcaggaacagtacggcgacgatcaggaggatcgtcgaggtgccgagcatccagaagatgaagatctccgaattcgaggcataggccgcgctgcgctgggcgaagatccgcatcacggaatcgtcgagctgcacgcggatctcgaccagattggacttgccgacggtgtcgatccagaacggacggctgatctggcggccgagctgcaccgagagcgtctggtcgagcagcgagaagaacggcttcggtcccggcggcggcatgtcgccggcgggcaggaagtcgaccaccagctgcagcttctgggcgatgtggcgaagctgggcgcggtccttgtcctgcggataattcttgtagacgtcgatcagcgcggcgatgtcggacaccaccgcggccgacagccgccgcgtcaccgtgttccagtgccgctccatgaacacgaacgcgaccacggtctgcaggatcaccatcggcacgatcatgatcagcagcgcgcgggcgtagaggccggtcggcatccagctcttgaacgcattgcccatccagccgttcgctttcgagacgcgctgcgaggcgttcttgatcagggtcaggccggaatcgagcgtgctcatggctggatcttatggcgaggcgaccaggcgatagccgatgccgcggaccgcctgcaggaacaacggattggcgggatcatgctcgatcttgcggcgcaggcggttgatctgcacgtcgaccgcgcgttcgttgacggtgccgccagaggtcagctcggcgcgcggcacggtctcgccgggggcgctggcgaggatgcgcagcatctcgcgctcgcggtcggtgagatggatgatctcctcgccctggcgcagctcgctgcgctcgatgtggaagatataggggccgaacgcgatctgctcgacggttatgacctgcggcggcgcggtgcgcttgaggatattgccgatgcgaagcacgagctcgcgcggctcgaacggcttggcgacgtaatcgtcggcgccgatctgaaggccctcgatgcgggcctccgcctcatggcgagcggtcagcatgatgatcggcaccgtggaggacgtgcggatgaagcgggcgaggtcgaagccgttctcgccgggcatcatcacgtcgaggatcagcaggtcgaaatgcagcccgagcagcttggcgcgggcgtcggtggcgctcatcgccgtcgtgacgcgatagccctcgccggagagaaagcgcgacaacaggtcgcgaatgcggcggtcgtcgtcgaccagcaggagatgcggtgcgtcgtcggccggttcgatcggcgcgcgcatcatggttgcagcctgcaccaggttcactcccttgcttttctgccgccgccgaagatggcttcgagcaccttgtccggatcgtcgcggtcgatcatcgcgcggaggaactggcggaccgtctcgacgccggccggatcgatgccggcgaccgcgcgattgatgcggtcggtctgcagccctgcgagcttggcgaccagtgcctcgcccttcggcgtcgcgtagagcaggcgctgccggcggtcgttgttgccggtcttctgcacgatgtagccctcgtccaagagctgcttgagcacgcgtccgagcgattgcttggtgatacgcagcacgtcgagcaggtcggcgaccttcaggccgggatagcgggtgacgaagtggatgacgcggtggtgggcgcggccgaagccgaacgcctccagctcctggtccgcgtcgccgacaaagtcgcggtaggcgaagaacaagagctcgatgatgtcccagcgcaggtcgcgtccacccgccgcaggagcatgatcatctccctgcgaatcgggcttggcagccatgcctgagaaatttatgtcagtcatattgacgtatcttgggttcaatgttacaaaactgcctgtcacgacgaaacattaggtcgtttcgtccccaacagcgtttgagtcggcctgaaagagcctgtgaggcggtttgggccgcaaactggactaccgtgcgattgtcgagcggcatttcggcaaacatactggacttcagcattccgcaaaagcatgtctaaacggcatgttggcgatggaaaccggcccgtgcggccggtggtggtgaagtccgggccagccgagcctgatggctccgggggaaacaggccggcgcccgatatggcgccggttccgacagcggaaagcaagaaaaatgactttgaaattcgacatccagccgtcgccgaatgcgacctccgacaaggatcgcgcggcgaagctcgtggacccgggcttcggtcgcgtcttcaccgaccacatggcgatcgtccgctacagccagggcaagggctggcacagtgcccgcatcgaggcacgcgcgaatttcccgctcgatccggccggcgccgtgctgcactacgcccaggagatcttcgaagggctcaaggcctacaagcgcgacgatggcggcgtgaacctgtttcgccccgacgccaatgcccgccgcttccgcgattcggccgaccgcatggcgatggcgccgctgcccgaggatctgttcatcgaggcggtcgagcagctggtgcggattgatcgtgcctggatcccgggcggcgagggcagtctctatctgcggccgttcatgatcgcgagcgaggtcttcctcggcgtgaagccgtcggcggaatacatcttctcggtgatcgcatcgccggtcggctcctacttcaagggcggtcctgcgccggtatcgatctgggtgtcggagaattacacgcgcgccgcgatcggcggcaccggcgccgtgaagtgcggcggcaattatgctgccagcctgcgcgcgcaggcggaagcgatcgagcgcggctgcgaccaggtcgtgttcctcgacgcggtcgagcgccgctacatcgaagaactcggcggcatgaacatcttcttcgccttcgacgacggctcgctgctgacgccgccgctcggcaccatcctgcccggcatcacccgcgactcgatcatcgcgctcgccaaggattccggcacgcgcgtgcgcgaggagccctacacgatccagcaatggcgcgcggatgccgccagcggcaagctgaaggaggcgttcgcctgcggcaccgcggccgtgatctcgccgatcggcaaggtctgctcggcgagcggcgacttccagatcagcggcggcgtcgccggtccggtcgccatgggcctgcgcaagaagctggtcgacatccagtacggccgcaccaacgatccgcataactggatcaggaacgtccagtgacggacgcgacgtcattccgggacgatgcgcagcatcgaacccggaatctcgcgattcccggtgcgcaatcgcgcggctgaggtatggtcctgcggaatatcccggagtgacagcgtagcggcaccggttgccgccttgcgcgccggctggtaaacggccgctcatggccgagaaacccaaaaaaccccaaaaactgaaggcgcgcctgccgcgtggactggaagatcgcggcccggctgcgatcaatgccacgcgggcgatggtcgaaaagatccgcgccgtctacgagctctacggcttcgagccggtggagacgccggcgatggaatacaccgacgcgctcggcaagttcctgcccgaccaggaccggcccaacgagggcgtgttctcgttccaggacgatgacgagcagtggatctcgctgcgctacgatttgactgcgccgctggcgcgctatgtcgccgagaatttcgacgcgctgccgaagccgtaccggtcgtatcggctcggctacgtcttccgcaacgagaagcccggtcccggccgcttccgccagttcatgcagttcgatgccgatacggtcggctcggcgacgccggcggccgacgccgagatctgcatgatggcggcggatacgatggaggcgctcggcattccgcgcggctcctatgtcgtgaaggtgaacaaccgcaaggtgcttgacggcgtgctcgaggcgatcggtctcggcggcgacgacaatgcaggccgcaggctcacggtgctgcgcgcgatcgacaagctcgacaagtttcccgccgacgaggttcgcaagctgctcggtcccgggcgatgggatggcggtgaagagggcaagggcgacttcaccaagggcgctgagttgggcccagcggatgccgatatcgttctggccgtcacgcaacagcgtgcggattggcgagaggcgattgcggcggcagaggcctacctcgcgaagagcgaggttggccaggccggcgtgagcgagctcgaggaaatcgcgaaactggtcgcggcgtccggctatggctcagatcgcatccgcatcgatcccaccgtcgttcgtgggctcgaatactacacgggtcccgtctacgaggttgaactgctgctcgacaccaaggacgagaagggccgaccggtgcggttcggctcggtcggcggcggtggccgctacgacggcctcgtctcgcgcttccgcggggagccggtgccggcgaccggcttctcgatcggggtgtcgcgcctgcaggccgcgctgacgatgctgggtcagctcgacgcgcgggccgaattcggtcccgtcgtcgtcaccgtgttcgaccgcgaccgcgtcgccgactaccagaagatggtcgcagagctgcgccaggccggcatccgcgccgagctctatctcggcaatccgaagaacatgggcaaccagctcaaatatgccgatcgccgcaactcgccctgcgtgatcatccagggctcggacgagaaggcgcgcggcgaggtgcagatcaaggatctgatcgagggcgccaaggcggcggctgcgatcgcgtccaaccaggaatggcgcgaaacgcgtccggcgcaattctcctgcgccgagaccgatctggtcgcgaaagtccgcgaggtcctggcgcggcatgacgtggcgtggggatagccattcgctggcgatgtgatgcccgcccttgtgccgggcatccgcctcttgtttgatgcacgccgacgtgaatggccgggaacagcctgaccatggcgacaacaagagggagagcaacaatgcctgagatcaccgtgagcatggccgccggccgcaccgacgagcagaagctcggcatgatgcgcgacatcacccaggcactggtgaagaatctcggtgtcgatgccgacgcggtcgtgatccagatcaacgaggcgccgctgcatcacaagatgaagggcggcaagtccttcgtcgagcgcgccgctgcggcgaagaagtaattcaacgtcgtcgtcccggccttcgccgggacgacagtatttttgaggcgccaatggacgcacgcgacttcatcaagatcggcatgagcgccgagcgcatgctggtggtgccgccggagcgcacggtcgggcatttcgtcccgggcatgccgatggtctatgcgacgccgatgatgatcctcgacatggagatggcgtcgggcgatgccatccgtggcgcgttgcagcccggctgggtgacggtcgggaccgaggtcgacattcgtcatcttgcagccgcgctcgtcggggccacggtgcggaccacctcgaaggtggtcgtggtcgagcgccgcgtgatccgcttcgaagtcgaggcgtttgaaggcacgcgcaagctcggcgaaggccgccacgcccgcggcctgatcaatgtcgagcgttttaataagcgtcttgccgggacgtcggcgcagtaagcgaggagctacttcgccaattccttcgagcgtcgtgtcgcggcggcgatggcgcgggtcatcaacggctggaggccgtcattcgccatcaacacgtccagcgcggcggccgtggtgccgccgggtgaggtgacgttttgccgcaacgtcgctgacggcaagtcggagcgatgcagcagctcgccggagcccgccacggtcgcgcgcgccagcgtggtcgcaagcgtttcgggcaggccggctgcgacgccggcgcgggccagctcctcggcgagcaggaagacataggcagggccggagccggagaccgcggtcaccgcgtccatcaggctttcgtcgtcgacccattcgaggagaccggtcgcctgcagcagtgcatcggtcatggcgcgctgcgcggcggtgacgcgctttgccggcaccgcgaccgtgatgccgcggccgatcgccgccggcgtgttcggcattgcgcgcaccaccgcgccgccgacgacttcttccagcgctgcgatggtcgtaccggccatgatcgagaccacgagcgtcgaggggccgacgagcgccttcagcgcggcgccggcctcgcggaacgattgcggcttcaccgcgacgaccagcgtgtcgaccgtgccgagctccgtcgcttgcggattgagccggacgcccttggccgcgagtgcggagatgtcaggcgacagatggggatcgatcaccgcgacctgcctgggcgataggccctgcgcgagccagccggtcagcatggcgccgcccatcttgcccgcgccggcaagcgcgatggtgccggaagtattcgtcaatgcgctgcttgtgttcacgggtcgctccacaaactctatgtcgtcccggcgaaggccgggacccataaccacatgtggttctagtgaggcgaggaaagggccacaagcagtttgcgtgagccccgcggccgcggagtatgggtcccggctcaaggccgggacgacactgaatatgcggatacccttacgcctcgccctcggtatcgaacatcgccgccgccatcgcctcggcggtcgacttgccggcccacaccacgaactggaacgccggatagtagcgctcgcaggcgtggatcgcattgaccaccatcgcctcgcattgcgcggtggaggcggtgaggccgccgggcagcaccagcgcctggcgatgcatcaccatgccggtgtgggtccacagatcgaaatggccgacccacaattgttcgttgatcgcggcgaccagccgctgcacctcggcgcggcgcgcctgcggcatcttcatgtcgaaggcgcaggcgagatgcagcgcctcgatctcgcccatccaggtgaacgagagctgatagtcgatccagtctcccttggagacgatcgtcacctcgtcttcgccggaacgctcgaacgcccagttgttgtcggtggcgatatcctcgaccaccgcaagcgggttgttccgggaatcgataatgctttcgaggagggacatgccgtctcggaccttgttcttatgatcgcttgatacgcacacggaagccggcacttgcgacatactgcgtcgtggccgagtgcagctccttgaccgggcttccggatgcccctggacctgacgccgatgaagtgatgtgatttgcggaatccgcgcaaccgcacgccgagtccgtccacagccaaagcgcgcatcgtccacagctgatctccgccacacttgtgattttgcgaacaaatcggaatcttcttggtcggtaaacgatttgttaaccatttgccggcgcttcgccgcgcgcgtgaatcagcctttccggcgctcacgtcactctgcaagagccgcaacgcgctcatggggacatgccgtttccccatgccaaaggtcttgcccggctgtcgcggtttggtcatagttcgtctcaggcgcgtccatcctgggcgtgccgatgttctcagggcggggtgaaaatccccaccggcggtaagggtgatgagcccaagcccgcgagcgccttcttccgcgaagccggaagaagggtcagcagattcggtgcaattccgaagccgacggttacagtccggatgaaagagaacggttgcggcggccctcgcgttttcgcgtgggtcaatgtcgttgtccgtatgccctgattctggtcctgaaagaggaaagccatgaatcagatgttgcaagacactgaagtccaaaacgccgaagtccaacccccccacgcagaaggcgtttccgacacgccggcacatccgccggcgctggagcatccgcactttgccaagccgcagcgcgttgccttcgtgcaatcgtcctggcatcgcgatgtggtggaggagtgccgcatctcgttcctgaaggagatcgaggcgcgtcacatcaccaatgtcgacgtgttcgaggtgccgggctcgttcgagatcccgctgcatgcgcagctcttggcgaagacccgccgctacaccgcgatcgtcgcggccgggctggtcgtcgatggcggcatttaccgccacgagttcgtcgccgacaccgtgattaaggcactgatggatgtgcagttgcgcaccgaggtgccggtgttctcggcggtgctgacgccgcagcaattccacgagaccgaggtgcattacgacttcttccgcaagcacttcgtgatcaaggggatcgaggtcgcggaagcctgcgccaacacgctgcacagcctggagcgcctgcgcggccaggtcgcggcggggatacccggataaggcgccggcgacgtccaaggccggacgcaaaagcgattccggcatgcgtgccgggatcgctctcgcagcctgcgtgttcggttatgctgccggcataatcagaacgcgcgggaggcgcccatgaccgaacaacattccaccgactggctcggcctgtcgggccgcattgccgtcgtcaccggcggaggcggcggcatcggccgcgccaccgctgtcagtttcgcgcgtgccggcgtcaaagtcgccgcgctcgatcgcgacgagcgtgggctggcggagaccaagacacagctccgcgcgttcggcgacggccatctcgtcgcgaactgcgacacaaccagcgaggagggcgtcgcggctgccgccgaggccgtcgcgcgcacgctcggagcttgcgacatcctcgtcaacaccgcggcggtgctgcggcccggcgggcttgatacgctgccgcttgccgaatggaacgcagtgctggcggtcaacctcaccggctacttcatctgcgcgcaggcgttcggccgccagatgcgcaagaccgggcgcggcagcctgatccacgtcgcctcgattgccgccagcaatgcgcaggggcagagcggcgcctacagcgtcagcaaggcggccgtcgtgatgctctcgcagcagctcgccgccgaatggggtccgcacggcatccgcagcaatgtggtcagccccggcctcgtcgtcacgccgatgagccaggcattctacgatacgcccggggttaccgagcggcgcaccgccgtggtgccgctacgccggatcggcgcgccgcaggacatggcggacgcgaccctgttcctggccagcgaccggtcgtcatacgtcaatggcgaggagatcatcgtcgacggcggcttcgcgcgaacgctgatgagccatgtgccgcggccggggttctaggaacgccgcatctgcaaattcagtgtcgtcccggccttgagccgggacccataaccacgaatgtttgttggttggaaaggatggggccacagcagagctccacaacagaaccctgtggtgatgggtcccggctttcgccgggacgtcagcaaggcattaatcgaacaggctcgacaccgactcttccgccgcggtgcggccgatcgcttcggcgatcaggccggcgatcgaaatggtgcggatgttcggcgccttgttgacggcctcggtcggcaggatcgagtcggtgatgaccagctccttgagccgcgacgaggcgatgcgcgcggcggcgccgccggacaacacgccgtgggtgatgtaggccgagacttccttggcgccgtgcccgatcagggcctcggccgcgttcaccagcgtgccgccggagtcgacgatgtcgtcgaccaggatgcagttgtagccggcgacgtcgccgatcacgttcatcacctcggactcaccggggcgctcgcggcgcttgtcgacgatcgcaagcggggtgttgatgcgcttggcaagtccgcgcgcacgcgccacgccgccgacgtcgggcgacaccaccatcaccttggcgaggtcgaacttttccctgatgtcgcgcaccatcagcggtgcggcgaacagattgtcggtcgggatgtcgaagaagccctggatctggccggcatgcaggtcgagcgtcatgacgcggtcgacgccggcgcgggagatcaggttggccacgagcttggccgagatcggcgtgcgcgaaccggatttccggtcctggcgggcatagccgaaatagggcaccaccgcggtgatgcggcgcgcggaagcacggcgcagcgcgtcggtgatgatcaggagctccatcaaattgtcgttggccggaaacgacgtcgactgcaggatgaacatgtccgagccgcggatgttctcctggatctcgacgaagatctccatgtcggcgaaacgccggaccacggccttggtcaattcgatgccaagtcccttggcgatatcctgcgccagcgcaggattggagttgccggcgacgagcttgatggatccgttttttgccgacatcgatgcttccccccgcgccttgctggatacgacgttcagcatctcaagtccttacagaaccggcgggttttcggtgcgcgagggaatatcaggcaggcggctccgctggcaacccattaggtcgccttggccgcggttttcctgggcaaaaaacgcatttcgccgggagataccgggggttagttggcggaatagctgagggcaacggtctcggacgcggcgggggccggggcgctgaccatcgccggcccacggagctccggcgccgcggcaggggctgggctgtccgccgggccgccattgatcatgccggagaggccgctgaggccggcctgggcgatcctgcgcagcaccaggtcgtcggcggcggcccaagcgtcgcggccggccttgccggcgggctcctcgccggacagtcggagcgcgcgttgctggttgctgtcgtagacgtcccagacccacgcgatcatggtgcggccacgcaccacctgcgccgacagatagctgcgcacgcgataggccgcggtgccctcgcgcgacacgatcgagaggctgcgcaacttggattcgctgtcgagcaccccgaccatgcggtcgaacacctggggcggtgggccgtcgatcgattcgaaggcgacagtggtgccgccgctcgccggcgtggccatcgcgtaggagtcggccacgttgccgccggcggcgcagccgccaagcacggacgcgaccgcaagccacgtggctgcgaccgcgatgcgcacgactgtcccagtttgaaactggtggtttgacgcgtccctcattgcgtcctgcgatatcgttaaaacggcttaacgtctagggcaggacggccacagcccttaaccgatccgcaggctgcgccacgaggtttcggatttccttgctcagtcagagagatggtgccgcatggctgccgtgatccaggcccattcgcggttcgggctcgcgtcgggcgactgtccgcgcatgatggcgaccaggtcccagtagcgcgccgcgcgggcgtcgtgcagcgcatacttgccgcgaatccagtttcggaattccagatcgggctctcgcttcagtagccgcgccgacgtctccagccagtcgcgcgccagtgcctgaccggcctccgaattcggtccgagcccgccagcgatgatctctttcgctctggccagcacggcctcgttggcctgctgccaggcggcgagatccagcacgtggtgattccagacgtcctcggcgttggcgcgcatgttggcgacgagcgtgggatcgttgagcatctgcgacagctcgatccaggcatcgcattgctcgggtgtcggatcatcgggcagttcgggcacgctggtctcgatcatctgccggatccatttccggtcgatgttgatgccgtcggatactttctcgaagaagcgttcgacgacgttgcggcgctcggcgcgggacagctgcgtcatggtcaggaatctcctcaaatctgcttcggtgagttgcggtgaacgcaacgcagcccgcagggccgaggcgacgcggcgctgggccgcaatctccgcttccagcgtctcgaggcggagcttcagcgcctcgaccagcgagagctccttggtcaggacctcacggatggcgtcgagaccgagccccgcatcgcgcaggcagcggatcaggtcgaggcgaaccagttcgtcgtcggtgaagacgcgatagccgctcgcggtgcggccggccggcggcagcaagccctggtccgaatagaagcggagcttgcggacagacattccgctgagccgcgccgcctcgccgatgctgtaggtgcgttgtgtcatgcgccgcttgtccggtctccagcaggcggagagtcaagccgcttgtcgcacaaaactggtgaggagagttcggcgtcagccttccagcacgatggcgtgaacgtgccggccgtaatcggcttccttgcggtgcacggagcggcggtagctgaagcagcgctcgtcggaataggtgtcgatgccgaggtcgtcgatcatcagcacgccggcgttctccagccgcatccggatgaagccggcgagatcgaacatcgcgtggccgtcgcgctcgctgggcatgaagaacatgccgttctcggcatcggcctcgatgaagcgcgtgacgaattcgccgccgacctcgtaggattgcttgcggatcagcgggccgatcgcggcgacgatgctgccgcgctcggcgccgagcttctccatcgcatcgatggtcgtctccagcacgccggtcagcgcgcccttccagccggcatgcgccgcgccgattacccgcgcattggggtcgacgaacaggatcgggccgcagtcggctgttgtgaccgatatcgcgagcccctcggtacgggtgacgagcgcgtccgccttggggcgcggcgcgccgttccacgggcgatccacgacgacaacgtcgggcgagtgcacctgatgcacgctgatcagatgatcgaacggcacgccgagctgctcggccatccgccgccggttctccgcgaccttggccggatcgtcgcgcgagccgagcccgccattgaggccggcatagatgccctcggagacgccgccctcgcgcgagaagaaggcgtggcgcaggccaggaatggccgacagcagcggagatcccagtgtcattgttcggtctcgtcaggctgatcgctgaggccggcgatcgaggtgaggtgcgggtcggagatggccatgaccttgaacatcgagcccatcccgccgcgtccggaatcggtcagccgcttcagtgcgccggcgatgtcggcggagacctcgggcgaggccttcgccatcagcccggcggcgcgggcctcgacgccgaggcgcttgaggaagtcgccctgcgtcgccggcccgtggacgcgcgcgccgacatcctcggcggcccgcgccagcgcctggaagtcgacatgcgcggtcacgtcggcctgccccgggttcttcagcgggtcggcgaagctgtggcgcgcgatcgcctgaaaggtgtcgccggcgtcgctgcgcagatggccgtaatcgatgatcagcgcggctccgtcctggtcgcgcacccgcgtagcgagcttcatgatctcgctgtcgggccgccattcgaacaccgcacctaacggggcggcgcgcaccagcggcggcagcagcacctcgaagtgcggcgtcggctcgggcgcgggcgcgaaatacaggttgccattggcgtccatcccgaccgtgcgctcgtgccagccggtctcgcggcggaccatctgatggatcggcagcacgtcgaaatattcgttggcgaggatcaccgccggcccctcgggcacatcgtcgatgctgtcgtgccaggtgatgttgcgcacgccggtcagcgtcgcgtgctgcttctcgcgcagcaccggattgacctcgacgaggtggatgctgagcgactggtagagcggcggcagcacgcgcagcgcccgcagcgcgtccgacatcatggtgccgcggccgggcccgagctcgatcaggcgcagcgtctccggcgagccgatcgcgcgccagatcgaggcgctccacagcccgagcagttcgccgaacatctggctgacctcgggggccgtggtgaaatcgccctcgcggccgagcggatcgcgcgacagatagtagccgtagcgcggatgcatcaggcacaattccatgtagcgccagaccggcatcggcccggacagcttgatcagcttcctgatctcatccagcagcggggagggttcgctcacggccttccttggattgcacttgtcttacgttgaactcggcgccggcccgttcgccttgcggcggagggcggccgtgatgatgatagcgccgacaataatcattggcaccgacagcagcattcccatggttaacccgccccacaggaatccgagttgcgggtcgggctccctgaagtgctcgccgatgatccgggcaatgccgtagatcgcaatgaagctgccgaggatcaggccgggccgcttcagcgcgcccatccggatcatgatcgccagcgccgtgaacagcacgatgccctcgagcccggcctcatagagctggctcggatggcgcggcagcggcccgccattggggaagatcatggcccagggcaggctcgcctctgcgtgccggccccacaattcgctgttgatgaaattggcgatgcggccgaggaacaggccgatcggcgcgaccgcggtggtgatgtcgccgagcgacaggatcgaaatgttgttgcggcgggcgaacagcatcaccgcggcgacgcagccgaggaagccgccgtggaacgacatgccgcccttccacaattcgaggatctcggacgggtgcgcgatgaagaacggcagattgtagaacagtacatagccggtgcggccgccgacgatgatgccgatggtgacccagaggatgaaatcgtcgagctgcggcagcgtgatcggcacctcgccgccccacagccgttccttcttgatcagcgagcgggcgtagacccagcccagcacgatgccgacgatataggccagcgcataccagcggatcacgatcggcccgagcgcgagcgcgacggggtcgaacaccggaaagtcgaccagcaggaacggcatcgggatcagagcactttcgtgtagacggcgtagggcacgccatgaatgggcggggcgtcatggaccttgctgaagcccatcttgagatacatcggcaaggcgaccgtcatgatggggctcgtgtgaagcgcaatggtccggcagcggtcgcgccgcgctctggcgaagcattccgacgtcaacgcatgcccgagtcccttgctcctgtcgacggggtcgacgaccagcatgcgaatgatcggccatgactgatcgaagaatgcggcctttttgacgccgggcccgaaatagccgaccgcgccggcaagccgggtgccgagatcggcgacgatgatctcgccgccggaactcaactcggaggttcgcgagaggccggcgcgcatcgccggccagtcgtcgaaagcgtcgcggaattggtcgaaggcagcaaccgcgagccggttcacctcgtcagcatcagagcttcgataatctcgaattcgcgcgccgtcggccatcccggtgcttgcggcctcagaccaggttgcgccggtagagcgcgagcagccgctcccaatggcgttcggcggcgtcgcggtcatagaccgggcgcttggggaacgcaaagccgtgatgcgtgccgggatagatctcgacttcgttgttggatcccttcatgcccgccttcacctgctcgatgatctcctgtggcgcgtagatatcggtctcggcgcaggcgaaatagagttcggccttggtcttgttggcggcgaggtgcgggctgtcgggctggtcggtcgccaagtgcgtgccgtagatcgaggcggcggccttgacgcgatcgccgaaatgcgttgccgcgttcaccgcgtagcgaccgctcatgcaatagccgacggtgccgatgatgttggtgttggcggccttctgcgtctcggcgtaggcgagcaagcccctggtgtcttccatgaccagtggaatgttcagcgagtgcatcagctcgaacatgcgcttgcgctccggcgattccggatcgggattgatcgggccgagctccatcacgccggcgcggtaatacaagttcggcagcatcacgtaatagcccgacgtggcgagcctgcgcgccatgtcgcgcagctcttcgcggatcgcaggggcgtccatgtagaagatcacgaccgggaaggggccgccgcgctcgggatgggtgatgaaggtggtggtcttgccgtccttggtcgggatctcgacggtatgctcgatcatgacgtttctgctcgcgttgtgatgtgcgatttctgttgtgagttcatacgattgcaaggaaaccggagcatgacaaggcaagctgcgggaggcctgccattcgcagcgcacttgaacccgatggctgacatcgccattgtcttgagcgcaatccagcgaatgcggagagttttgccagatgacccagaccagcaaccggtttttcgatgagatcggccgtctgatgaacgacgctgccggcgccgcccagggtgtcaagcgcgaggtcgacacggtcatgcgcaaccaggccgaacgcatcctgcgcgaccttgacgtggtcaagcgcgaggagttcgacgcggtcaaggacatggcccgtctggcgcgcgaggagaacgaggcgctgaaggtgagaatcgccgcgctggaagccaagcttggcggttcggccggttgacggtcgctgcacccgggctacaacggcgtcgcttgggcggcgcccaagaaaaatcccttcatttccttgtcatttcggccctttggggctaaaagcccgccacgtccgcggcccccgcacccctggaggcttgctgtggacttgagcatgggccgcgctgcggcctttaacttttcaaatacaaggacttaacgctatggcgaccgtcaaggaattgaaggcgaccgcgcgtccgaagagcggcaagggggccgcccgggcagagcgtcgcgccgggagagttcccggagtgatctacggagacaaccagccccccgtcaccatctcggtggacgatcgtgacctgcgccagcgcatcctggcgggccggttcctcaccacgctgttcgacatcgaactcgagggcaagaagcaccgcgtgattccgcgcgactaccacctcgatccggtcaaggacttcccgatccacgtcgacttcatgcggctcggcgaaggcgccaccatccgtgtcagcgtgccgctgcacatcgtgaacggcgaaacctcgcctggcgtcaagcgcggcggcaccgtgaacatcgtcacccacacgctcgagcttgagtgcgcggtcgacaatattccgcaatacattgaagccgacgtcggcagcctcgagatcagctattcgctgcatctctccgacgtcaagctgcccaagggcgtgaagtcgctgacccgcgaggacgcaaccctggtcaccatcgtgccgccgtccggctatgccgaagagcagaaggccgcggctgcggcggctgctggtggcgctgcggctccggccgcgggtgctgcggctccggctgctgctccggctgcgggtgctgcggctccggccgcgggtgccaaggctcccgccggcggtggcgacaagaagaagtaaccgataaggtcggcgcgcgatcctctgatggcgcgccgacgcgggatgctgcgccatgcgcctttttgtcggtctcggtaatcccggcgcgaaatacgccagcaaccggcacaatatcggtttcctggcggttgacgagattgcacggcgtcatggtttcgcaccatggcgccgtcgctttcagggcgagacctccgagggcgtcgtcgatcgtgagaaggtcgtgctgctgaagccgaccacttttatgaacgagtccggacgcgcggtgcaggaagcggcgaacttcttcaagctcgcgcccgccgacatcaccgtgttccaggatgagctcgagctgccgccggccaaggtgcgggtcaagatcggcggcgggatcgccggccataacgggctgcgctcgatctccgcgcatatcggcaacgagtatcggcgggtgcggctcgggatcggtcatcccggcgtcaaggagctcgtgcacagccacgtgctgtcggacttcgccaagagcgaccgggcgtgggtggaggccttgtgccaggccgtcgccgacaatgctggcctgctggcagcggggcaggacgcgtcgttcgccaacaaggtgcatctgacgatgcaggccaagggatttttcgacaagggtgagaatggcggcgacaagccggcctgatcccttgttctatgcccggcgcaacgccggtcgtgatgaagatggatagaggaagacatgggattcaaatgcgggatcgtcgggctgcctaacgtcggcaagtcgacgctgttcaatgcgctgaccgagacggcggcggcgcaagcggccaactatccgttctgcaccatcgagccgaatgtcggcgaggtggcggtgcccgatccgcggctggacaagctcgcagcagtcgccaaatccgcgcagatcatcccgacccggctgacctttgtcgatatcgcaggcctggtgcgcggcgcctcgcagggcgaaggtctcggcaaccagttcctcgccaacatccgcgaggtcgacgccatcgcccatgtggtgcgctgcttcgaggattccgacatcacccatgtcgaaggcaagatcgcgccgctcgccgacatcgagaccatcgagaccgagctgatgctgtcggacctcgacagcctcgagaagcgcgtcgacaacctcaccaagaaggccaagggcaacgacaaggatgccaaggaacagctcgagctcgtcaaccgcgcgctggtgctgctgcgcgacggcaagccggcccgcgggctggagcgcaagccggaggaggagcgcgcgttccgcatgctcggcctcttgacctcgaagcccgtgctctacgtctgcaacgtcgaggaaggctcggcgaaggacggcaacaatttctccaaggcggtgttcgagcgtgcgaagcaggagggcgcggtcgcggtcgtgatctccgccaagatcgaatccgagatcgcgacgctgtcgcgcgaggagcgtgtcgacttcctggagacgctgggcctcgaagaagccgggctcgatcgcttgatccgcgccggctaccggctgctcgacctcatcacctatttcaccgtcggcccgaaggaagcgcgtgcctggaccatcgaccgcggcaccaaggcgcctgccgccgccggcgtgatccataccgatttcgagaagggtttcatccgcgccgagaccatcgcgtatgaggattatatcgccggcaacggcgaagccggcgcacgcgatgccggcaagctgcggctcgaaggcaaggactacgtcgtcgccgatggcgacgtgatgcatttcagatttaatacctaaacacgatctctcctcaacgtcgtcccggcgaaggccgggacgacgttgaacctgaggccgctgctctttcccacgtcgtcccgggcaagcgaagcgcgacccgggacccgtaaccacagggcgcagttcttgcgctacgctgtggcgccagctcgctctatcctaacgtcctgtgtatgggtccctgctttcgcagggacgacaccgagtacgcggtagctctgacacctcaccgatccgcgcgcccgatcacgtccatcagctcggtgatcttgcgccgctggtcggccttgtcgccggacgagatcgcatgctcgacgcaatgtgccacatgatcgcgcaggacttcctcctcgacgcggcgcagcgccgcgcgcgccgccgcgatctgcgtcaccacgtcgatgcagtaacgatcttcctcgaccatggtggccagcccgcggatctgaccctcgatccgtttgagccgttttaaacaggatgtcttgacctcgtctctcatccgtctcatatacccccctagggtatgaagatcaagaggccgggatacggccgggaaagggtttcgtggcacaggcgcagcacgaccattcgcacggagatcatcatcatggcgcggccgcgcattcctgctgcggcggcaagcatgatcacggcaccacgcccgccgaggcggccttcgcgatcgatccggtctgcggcatgaaggtcaacccggcgactgccaagcaccgcttcagctacaagggcgaggagtatctgttctgcagcggccgctgccgcgagcgcttcgaggcagatcccgagaagtacctcaagccccgcgaggcggagccgccggcgcctgccggcacgatctacacctgcccgatgcaccccgaggtacgtcaggtcggtcccggcagctgcccgatctgcggcatggcgctggagcccgagcaggtctcgctcgacgacggacccgaccctgagctgatcgatatgacgcggcggttctggatcggcctcgcgctcacgctgccggtgttcgtgctcgagatgggcagccatctcgggttgatgcacctggtaccgatgggctggtcgaactggatctcgttcgtgctggcgacgccggtcgtgctgtgggccggcgcgccgttcttcgtgcgcggctggcagtcgctggtcacccgcaatctcaacatgttcacgctgatcgcgatcggcaccggcgtcgcctatctctacagcgtcgtcgctacgctggcgccgcagctcttcccgcccgcgttccgcgacatgcatggcgcggtcgcggtgtatttcgaggcggcggccgtgatcacggtgctggtgctgctcggccaggtgctggagctgcgcgcccgtgcgcagacctcgggcgcgatccgcgcgctgctcggccttgcgccgaagaccgcgcggcgcgtcaccgatcatggcgacgaggacatcgacatcgacgcgatcaaggtcggtgaccgcctgcgcgtgcgccccggcgagaaagtgccggtggatggtgtcgtcatcgagggcagcgcggtcatcgacgaatccatggtgacgggtgaatcgatgccggtcaccaagtcggtaggcgcgaacgtgatcggcggcaccgtcaaccggagtggcggcctcgtgatgcgggccgagaaggtcggccgcgacaccatgctgtcgcggatcgtcgacatggtggcgaaggcgcagcgctcgcgcgcgccgatccagcggcttgccgatcgcgtcgccggctggttcgtgccggcggtgatcgccgctgccgtgctcgccttcatcgcctggacggtgttcggtcccgagccgcgcctgaccttcgcgctggtcgcagccgtcacggtgctgatcatcgcctgtccctgcgcgctcggattggcgacgccgatgtcgatcatggtcggtgtcggccgcggcgcgcattccggcatcctgatccgcgacgcgcaggcgctggagcggatggaggcgatcgatacgctggtgctcgacaagaccggcacgctgaccgaaggcaagccgaaggtggtgcgcatcatcgcggcggaagggtttgacgagggcgatctgctgcgcctcgccgccggtgtcgagcagggcagcgagcatccgctggcgcaggcgatcatcgcggcagccaaggagcgcaagctcgcatcatccgccgtcaccaattttacttcgccctccggcaagggcacgaccggtacggtcgagggcaagcaggttgcgctcggcaacgcggtgctgatggccgaactgaagatctcgacggcaacgctggaccagaccgccgaggctgcgcggcgcgatggcgcgaccgcgatctatgtcgcggtcgatggtcgtgtcgccggcgtgatcgcgatcgccgatccgatcaagccgtcggcggccaatgcgttgcgagcgctacgcgccgacggcttgcgcatcgtgatgctgaccggcgacaatgagaccaccgcgcgcgcggtggcgaagacgcttcgtatcgacgaggtcgaggccggcgtgctgccggagcgcaagagcgaggtcgtgcagcggctgcgcggcgagggccgcatcgtcgcgatggccggcgatggcgtcaacgatgcgccggcgctggctgcggccgatgtcggcatcgcgatgggcggcggcaccgacgtcgccatcgagagcgcgggcatcacgctgctcaccggggacttgatgggcctcgtccgcgcgcggcgcttgtcggtcgcgaccatgcgcaacattcgccagaacctggcgttcgcgttcgcctacaatgccgccggcgtgccgatcgcggccggcgtgctgtatccgctgttcggcatcctgctgtcgccgatggtcggcgctgccgcgatggcgctgtcctcggtcagtgtgatcggcaacgcgctgcgggtgtcgcgggtgaagctggattgagctatcacgatcggtagcccggatggagcgtagcgaaatccggggccggtcgcatcacgtggagatggccccggattgcgcttcgctccatccgggctacgaagattgcaaaagttacgccggcagcaacagctgcgcgcggcgctccatctcggcatcgagccaggttgcgagatcctcgctcacctcgaccatcggcagccgtacctcgggactgtcgatcagccgctgccgccacagccagtgcttggccggcgcggggctgggttccgcgaacagcagcctcgtcaggccgacgacgctctgccaggcggtcagcgcgaggtcgcgcttgccctgccgcagcagcgtgcggatcgaggcgaaggtgtcggtctccagatgtgcggacagcaggatcgcgccgtcggcgccgtcggagagcgcatcgaaggtctgcgcgtcctcgccggtcagcacgcggaagccggccggccgccggttcagaaagtcgatcgactgcgcgcggtcggcgcagcaatccttcatgccggcgatgttcggatgttccgcgagcgccagcagcgtctcattggtgaggttcaccgccgtgcgatagggaatgttgtagagcacgatcggccacgacgcatgatcggcaagcgcgttgaagtgctgcaccagcccacgctgcgagggcctgatgtaatacggactcgcgatcagatagccgttgatcggccagtcggcggtatcatccagcgcttccttcatcctggcggtcgaggcgcctgacagcccgaggcagaccggcagatggcgggagctggcactgagctcgtcgagcacgacgctgaccagcccctccagctcatcggtgctcagcgccatgccttcaccggaggttgcaccgagaatgaagccgtcgacggggccgccggcatagtgccgcaccaggcggcgcagcgaggtgacgtcgagttcgccgtcgcggaacggcgtgatcaaaggaagccagaggccctgcaattgctggtgcagctcagtcatgttccatctcctcaggggacaagccggagacgggaccaacaaaaaaccccgtcctagcggcggggtttcgggatcgttgaatgcgaaggtgatcttatcgcgcgcgatctcgtgtccccggaaggggagcttttttcgacgagagagcggcgcacgaagtcgtgatcatgcgataatgatgctgcgctgcgaggttgttgtcaatgcacgtgctgaccgtgacgtgcggcacgttggcgacgaaaaaaagccgggctcaagcgagcccggcttaaggtattggccacgtgaggccgacacaatcaccttccaagagggattactgaacttccgcgccactggaggagggggacatatgcgcgacgcgaccgctcagcgtgtcaccactatgatccccatcgacgccttgcagcaacactccagctcgcatgtcagtcatgcggagagtcaggggcctgttgccccagcgcggaagccccataaccccgcccataaggcaggcttaatcaggacggccagcgctgcgccttgctcaccacgaagtcgcggaacacctgcacccgggccactgtcttcagctcttccggatagacgaagtaggtgtcgagcgcgatcgagtcggactcgccgaacagctgcacgagattgttctgttcgaccagataatccggcagcgcggcgatgccgaggccctgctggcaggcgcgcaccaaccccaggatgttgttgaccttgaagtagggctcgcgcggaccggagccgttgcggccggcgtcgatcagccagctgcggttctgcagatgcggcggcacctgcgagtcgccgagcatgatgatgcggtgcgagtcgagatcatccagcgtgcgcggcgtgccgaagcgcttgatgtattccggcgagcaataggcatggaagccgatcgagaacagcttgcgctggatcaggtccggctgggtcggcttgcgggtgcggatcgcgacgtcggcctcgcgcatcgacaggtcgaggtcctcgtcggtgacgatcagcgagatccggatgtccggatagagcgcggtgaactcgtcgagtcgcgggatcagccagttgatgccgagcgccggcggggtcgtgatcttgaggtcgccgctcggccgctcgcggctgtcggtgagcttggcgcgcgccgcctgcagctgcatgaacacgtcatgcgcggtgcggaacaggaggtcgccctgttcagtcaggatcaggccgcgggcatggcggtggaacagcgagaccgagagttcctgctccagcgcgctgacctggcgggagaccgccgattgcgacaggccaagctgctcgccggcatgcgtgaagctgccagcttccgccgccgcgtgaaagaccttcagcttgtcccaatccatatccgtaaatccgtcgcgagatcgtgccatgattattccgccgctgcgcgatcgctcgcgcggagagccaggaagcgttcggcttcgagcgcggccatgcagccgaggccggcggcggtgaccgcctgccggaaggtctcgtccgccacgtcgcccgcggcgaacaggccgggcacagaggtcgccgtggagttcggcgccacctcgacatagcccgacggtttcagcttgatctggcctttgacgagttcggtcgccggcgcatggccgatcgcgatgaagacgccgtcggtcttgaggtcggtcagcgcgccggtcttgacgttcttgagccgcacatgggtgaccttgttcgggttctgcgatccgcagatctcgtcgatcgcggaatcccacaccaccttgatcttgggatgcttgaacagccgctcctgcaggatgcgctcggcgcggaagtgatcgcggcgatgcacgatggtgacctgggaggcatgattggtgaggtacagcgcttcctcgaccgcggtgttgccgccgccgaccaccacgacttccttgccgcggtagaagaagccgtcacaggtcgcgcaggccgagacgccgccgccctggaatttctcttccgagggcagaccgagccagcgcgcctgggcgcctgtggcgaggatgacggtctcggcgagatagacgtcgccggaatcgcaggtcaggcggaacggccgttgtccgagctccagcttggtgacgagatcggtgacgatcttggtgccgacatgggccgcctgcttctccatctgctccatcagccaggggccctggatcacgtcggcgaagcccggatagttctcgacgtcggtggtgatggtgagctgcccgcccggctggatgccctggatcaggatcggttcgagcatcgcgcgcgctgcgtagatcgctgcggtgtaaccggcggggccggacccgatgatgacgaccttggcatggggaggcgcgggcattttgagatccctctcttttggggattttgatcaaggacttgtgcgggaagcgccccggaagcaggtcacggcggcgccaaaagtgtcaaatccaagtctaggatatctgggtagctatgcaagaattgcaatccatggcagcgaattttccccggaactgaagtcacattcgcgaaatcgtgcgctgcacgcgcaataaaattgcgcaatgccggtcggctgcgctatgagagttgccggcagaccagccaagactttcaaacttctaaggaactgcagtcgcgtgtcgaagaaccttgacgagatcgacctcaaaatcctcgccgagatccaggccgatggccgaatcaccaatgtggaactcgccaaacgggtcgggatctcgccgccgccctgtctgcgcagggtccgggcgctagaagaggaaggctacatccagggataccgtggcctgctcgatccgcgccgcctcggctacgacgtcacggtgttcgcctcggtgcacctgtcgagccaggccgatgccgatctccgcgccttcgagaatttcgtgcgcggcgaaccgctggtacgggaatgctggatgctgtcgggcgaagtcgatttcatcctcaaatgcgtcgcccccgacatggcgacgttccaggatttcgtcacccacctgaccgccgcgccgcacgtgcgcaacgtcaggacgtcgctggtgctgcacaattcgaaatatgaggccgcggtgccgctgggcgtgaaggttgcgggctgacgcgctcgatcacatccaccgtcattgcgaggagcgaagcgacgacttgtccgccatagccttggcgaaggcggaagcaatccatcacgccgcatgtgcggacagatggattgcttcgcggagcctgtcatcgggcgcgcattcgggcgacccgttggctcgcaatgacgatgccggctagttcttggtccgttacctcttgcctatcgcggcgtcgacgctgatcgggcccgggcccgaggtcgcgagatataggcaggcaaagcagaatgcgattgcaaggctgccgttgttgagcagcggatagaagcccttggggaaatggcccatgaagtaggcgaaggccatttcgcctgccaggacgaaggccacgatccgcgaaaagaggccgatcatcagcaatccgcccaggatcagttcgagcgtgccggccgcgccgatcaatgagaacagttcgactttctcgaacatcgtcccgggtgggaatttgaaaagcttggcgacgccgaactgaaacagcagcagccccgtgatgaagcgaaacaggctgagcgccagcggctgaagcttggatagtgtctggtccattgtcatttaccccctgtttgacacgctggaacattgcacgatgcagaaccacacggtgtccgccaccggagtgtgatgtcaacaccttgcacctggaatcattcctcgcgcgattgcagttgcgagagaacacaccagtgacgcggggacgcgctgcgatgcaatcgtcagccgagccgcagtcccccgacatgattatattgcataaacatgtcgtggcctccctagtatggcgcgccgcggccctccactcacattgctgtcagaccgggggtaaaacgcgggcacaaaaaaagccgcgtgcgatgcgcggcttttttgcaccagtcacatcgaggtaactagcgccactcgaccttggtgatctcgtaggccttggcgccgccgggcgccatcacttcgacggtggtgcccttcttcttgccgatcagcgcgcgcgcgagcggcgaggtgatcgagatgcggcccttcttggcatcggcctcgacctcgccgacgatctgccacaccgccttcttctcggtgtcctcgtcgatcagcgtcacggtcgcgccgaacttgatggtgtcgccggacagtttcgaaatgtcgatgatgtcggcgcgcgccagcttgtcctcgagctccgcgatgcggccctcgttgtgcgactgctcttccttggcagcgtgatactcggcgttctccgagagatcgccgtgcgagcgcgcttccgcaatgtgttcgatgatgcgcggacgatcctccgactggcgccgcttcaactcgtccgtcagcgcggcgtatccgcccgcggtcatcggaaccttatccatcatcttcgtccttcatcctgcgcgcccggcggctgtgcaggaatatccagttcagctaacgcaggaatcagggcgcaagcgcgcccggaagcccagtgattttcggccccgctaagggccgtgacaacatccaatcgcgcggtgagttccagccattcggctaattgaccgcttcgggcatttggcccgggcagcggtcagctttcggaaaagtaactctgaagcgtgcggacctcaaggtccccgtcccgataggcccggatcccccgtgcggccgccaccgcgcctgaaagagtggtgtaatatggcactttatgcaagagggcagcccgccgcagcgaacggctgtcggccagcgcctgcggaccttcggtggtattgaagaccagctggacgtcgccattggtgatggcgtcgacgatgtgcggacggccttcgagcaccttgttgaccttttccgtcggcacgccgttgtcgctgagatagcgctgcgtgcccgaggtcgccatcaccttgaagccgagtgagtgcaacagccgcaccgcgtccgcgatgcgcatcttgtcgtcgccgcgcaccgagacgaacacggtgccctgccgcggcacacgcgtgccgccgccgagctggctcttggcgaatgcgacctcgaaggagcggtcgaggcccatcacttcgccggtcgagcgcatctccggtccgagcacggtgtcgacaccggggaagcgcgcgaacgggaataccgattccttgacgccgacatggccgagcttcttcttcttcagcttgaagtcggcgagcttctcgccggccatgatccgcgccgcgatcttggcgaccggcgtgccgatcaccttggcgacgaacggcacggtgcgggacgcgcgcgggttgacctcgagcacgtagatctcgccgtccttgatggcgtattgcacgttcatcaggccgaccacgtcgaggccgagcgcgagctcgcgggtctgccgctccagctcctcgatggtgctggcgtcgagcgagtgcggcggcagcgagcacgcggaatcgccggagtggatgccggcttcctcgatgtgctccatgatgccgacgacgaaggtatccttgccgtcggacaggcagtcgacgtcgacctcggtggcgtcagacagatagcggtcgaacagcagcgggttcttgccgagcacggtgttgatctgcccggtcttgtcgttcgggtagcgcgccttgacatcggcgggcacgagctcaggaagcgttcccaacaggtagtcgttgagctgggtctcctcgcggatgatctgcatcgcacggccgccgagcacgtaggacggacgcaccaccagcggcaaatcgagatcggcggcgaccaggcgggcctgctcgaccgaataggcgatgccgttcttcggctgcttgaggcgcagcttgtcgagcacgcgcttgaagcggtcacggtcctcggcgaggtcgatcgcgtcgggcgaggtgccgaggatcggcacttcggcggcttcgagcgcgcgggcaagcttcagcggggtctggccgccgaactgcacgatcacgccgtgcagcgtgccgttggtgcgctcggtcgcgacgatctcgagcacgtcctctgcggtgagcggctcgaagtacagacggttcgcggtgtcgtagtcggtcgacaccgtctccggattgcagttgaccatgatggtctcgtaacctgcgtcctcgagcgcgaagcaggcatggcagcagcaatagtcgaactcgatgccctggccgatgcggttcggcccgccgccgaggatgatcaccttcttgcggtccgacggtgcgctctcgtcggcaagctcgccggcgaacggccgctcataggtcgaatacatgtaggcggtgggcgaggcgaactcggccgcgcaggtgtcgatgcgtttgaacaccgggcgcacgccgagcgcgtggcgcttggcggtgacgtcggcctcggtggtttcggtgagcacggcgaggcgggcatcggagaagcccatcgccttcaacgtccgcatgccgaacgcgttcggcggcaggccgttattgcggaccttgtcctccatctcgacgatggcgcgcatctccgcgaggaaccagggatcgatcttgcaggagttgaagatctcctcgtcgctccagccgagccgcatcgcctgcgcgacctgcaggatgcggttcggcgtcggcgtgccgagcgcggcgcggatcgcgttcttgtcgtcgccgcggccgagcccctcgatctcgatttcgtcgagcccggtcaggccggtctcgagcccgcgcagcgccttctgcaggctctcctggaaggtgcggccgatcgccatcacttcgccgaccgacttcatcgacgtggtcagcgtggaggaggcaccggggaatttctcgaacgcaaagcggggaatcttggtgacgacgtagtcgatggtcggctcgaacgaggcgggtgtggcgccgccggtgatgtcgttggcgatctcatccagcgtgtagccgaccgcgagcttggcagcgaccttggcgatcgggaagccggtggctttcgacgccagcgccgacgaacgcgacacgcgcggattcatctcgatcacgaccatgcggccgtcggccggattgatgccgaactgcacgttggagccgccggtctcgaccccgatctcgcgcagcaccgccagcgaggcgtcacgcatcacctggtattccttgtcggtcaaggtcagcgccggcgcgatggtgatggaatcgccggtatgcacgcccatcggatcgaggttctcgatcgagcagatgatgatgcaattgtccttcttgtcgcgcaccacctccatctcgtactctttccagccgagcacgctctcttcgatcagcacctcgttggtcggcgacgcatcgagcccgcgctcgatgatgtcgaggaactcttccttgttgtaggcaatgccgccgccggtgccgcccatggtgaaggacggccggatgatcgcaggcaggccgatctcggacagcgccatcagcgcctcgccgaacgcgtgctcctgatagcgcttgcggcggtcgttctcgccgagggtccactgccgctcgagctcttcgagcgccgcgccggacagtttctcccgctcggcgaggtatttgtcgcggtaggtcttcttcagcgccgaagcgttggcgagccgcgatttcggcgtctcgagcccgatcttggtcatcgcctcgcggaacagctggcggtcctcggccttgtcgatcgcatcagcggtggcgccgatcatctcgacgtcgaacttgtcgagcgtgccctggcggcgcaacgacagcgcgcagttcagcgcggtctggccgcccatggtcggcagcagcgcgaagccgcccggaatgacgtggcgttccttctcgatgatcttgccgacgatctcgggcgtgatcggttcgatataggtcgcgtccgccagttccggatcggtcatgatggtggccggattggaattgacgaggacgacgcggtaaccctcctccttgagagccttcaccgcctgcgtgccggaatagtcgaactcgcaggcctggccgatcacgatggggccggcgccgatgatcaggatggtggagatgtcggttcttttgggcatcagctctcgcggactggaatttgggcacaaaaaaagggcgcgcttcccgcgcgtccctcgagccatgcgctacatcttgcagcgccggaagcgcgatccctcgcgcgcgggtggtctttagaccagtttccgcacccgcgaaacccccaaaagcgcccaatcaaccgcgattctcggggaaaaattcgcattcggcgtaggccggttggggtggtcgggagggcaatcgcatgcggccacggcgatgtcccatcgcaggggtgaggcgcaccggaacaatttcgggataatagaataatgccgctgatttgcccgacatgtcaagctgcaatgtcgaatgccggcacgccgccggctcctttgcatggggttgttttcgatgttttcgcagcgcgcgggggccatgctccggcgccgtcccgtccgtctacgctttcgctcaagctacgccggacacgctttgccccgccggtccggcgtggctgcgccacgcgcagcccgtcagggcgaagcgtggaggcccggcctggatttgaaccaggataaacagtgttgcaccactgccgcgtcgaagcttccgccaccgggccggggggatcattgctgattatttcagcggccgctacgtttacttttagttaaccctaatattctctacaacctctgatcagtggtgagccacgaatgtcatccgccacggattgtgcccgatgttgcgcggcgcgcgggtggccgtgaaccccgcggcggcgaactttgcgatcatctcgtcctcgcgatagcgctgcagcccgatcctggtgcgcagctgtcggtagtccgacagcgcggtcgaggccagcccgaccagcgcatcgcgcaggaagccgtgggtcgctgcaaagcgcagcagcgcgatgacgtccctgcccatgccgacctcgggccgcaggatatcgccgagcacgaaacgccccgagggtttcagcaggcgatggataacgtcgaatgcggtatcgagctcctgcggcgtcatgtattgcgccaccgagttcatcaccacgaggtcgatcgagtccgcctgcatgttcttcagctcatcgagcgatcggacgcggatcctggtatcggacgcaaagcgcgcgaccagccgaccgcgcacgccgggcgcaggctccgccagatagagctgcgcgcaggcattggcgacctttaccgccgacagcgcctcaccgcaggcatagtccagcaccacggcgtcgggcgaggtgatgtatccgatgatgtcgtttgcgatgacctggaaatgcaggtcgcggtgcagtcggctggcataaatcgtatgtgtggaatcgtaatagtcgatccattcatccatcgcgtttggtatccggcaaaacgaggttccgcatcttggaacagggcagctgatgatgcgttagcggtaaggcgcccgatgttcaatgcgccgaaatacgggttcctaacaggaaggtgcaaagtgagcaaagccaagaatgacactcacaagactgacaagatttcgcccgatctcgatacgccgagcgacctgccgcaggcggcggtggagaagatttcggcctcgctcaacacgctgctggccgacgccttcgcgctgtatctgaagaccaagaacttccactggcatgtcagcggccggaattttcgtgattaccatttgttgctcgacgagcagtcggacgcgatcttcgcgaccaccgaccagctcgccgaacgggtgcgcaagctcggcggcgcgacgctgcgctcgatcggcgacatcgccaagcatcagaccatcaaggacaatgacgaggcctatgtcccgccgcgcgaaatgctgcgcgagctgatggaagacaacaagcatatggcggccgcgatgcgcaaggcacacaagctcgccgatgaccatgaggactccggcacggccggcctgctcgaaaccttcatcgacgaaaccgagcggcgcacctggtttctgttcgaggccagccgtcaggaaggcagcaacgcggcttagcccttgtgtcgctgcatgggggtgggtggcggcgcgtcggcgccgtgcccgccatccctgctccgtgcgcgtgaaggtaggctcgcgtcgctttgcccaccctgcgggtgatctccattgctgagaggtggattgcgtcgcttcgctcgcaatgacggagcattaccgcttccacagccgcacgagcggcccatccttccccatgactggatcagtcgcgggaatcgcgaccagcgggattgtcttcagtgccctggcgcgattctccggcgtcggccgttgcagatccatcggcgggcccggcggataggcgccgaccacggaaaaatcatcgctcgccgacaggcactgatgcccggtgccggccggcaggatcgcgacgtcgccggctgcgatctcgagcgcttgcccattggcgccgccgaactgcacgcgcgcacggccgcgggcgacgccgagcacctcgtgcacggtggcgtggtaatgcgcgaaatcgtagacgccgttgcgccacatcgcgccccagccatggctgccgaacagctgctcgatcgcagcctcgggatctcgaccggcatcgaccgcgcccctgtagaccaagaacggcatcggattgttcggcaccagcccgtcgtcttgaaagaccatcgcaagcggctcggctccggctttgactgcggacatggcgatcctccggtaagtgctcagcacgcgtgagcaatctattcgcggagcaacccgctgtcagcgccgcaagttcctgggaaactcagttcgctttgggcagctcgaacaccaggcaggtcgtggtggcgtgtgcgatcagcttgcccttgccgtcggtgatccgcgcttcggcggtggcgacccggcggccggcattgagcaccttgccctcggtacggatcgtgccggtgtcctggctcatgccgcggacgaaggagatcttgaactccagcgtggtgtagccaaagccctgcggcagcgtggtctgcaccgcgagccccatcgcggagtcgagcaggatcgcggcgtagccgccatgcaccgagccgatcgggttgtagtggcgcaggcccgggatgctgtggattaccacatgaccggtctcggcggtgcagtcgaacggttcgacgttctccatgatcggcggctccggcagggtgcaggcaaagatgccgcgcacgaaatcgagcccgggcatcgacaccatgacctccatcgacgagacgccgtaggtgggcttcggggtagcgctctcggtcatgtcggacaatcctgctgcttgatgatcgtcatcatatgacgagtagctcggcagcaaccgctcatgcaaggcgtgacaaaagctcatgcccggaccaggtggtccgggcatgctttattcgacgaaggactgcgctggtggccgcggtctacgccgcttgcttcttcttccgcatcaaatcggcaaagcgctggaacagatagtgcgagtcgcgcgggccgggcgaggcctcggggtgatactgcaccgagaacaccggcttgccttcgagcgcgataccgcaattggaaccgtcgaacagcgagatatgggtctgggtcgcaccggcgggcagcgtcgcctggtcgactgcaaagccgtggttcatcgaggtgatctcgaccttgccggtggtctcgtccttgaccggatgattggcgccgtgatggccctgatgcatcttcatggtcctggcgccgacggcgaggccgagcatctggtggccgaggcagatgccgaaggtcggcgtccccgaggcgatcaccttctggatcacgggcacggcatatttgccggtcgcggcgggatcgccggggccgttcgacaggaacacgccgtccggcttcatcgccaggatgtcctcggctgccgtcgtcgccggcaccacggtcaccttggcgccgactccggcgagcaggcgcaggatgttgcgcttgatgccgtagtcgatcgcgaccacgttgaattccggcgcggtctgctggccgaaacccttgccccacgcccagggcgtctcgtcccaggtgaagcgctggccggaggtgaccatcggcaccaggtccatgccctcgaggccgggccattcgcgggcctcctctttcagtccgtgaaggtcgaattcgccggtcttcgaatgcgcgatcaccgcattcggcatgcccctggagcggatcagcgcggtcagcgcgcgggtgtcgatgccggagaggccgatgatgccgcgcgccttcagccactggtcgaggtggcgggtggcacggtaattcgaggggtccgtgatcgccgagcgcaggatcacgccgcgcgcgccgggtgtcgcggccatgttcaccgtctcgatgtcttcctcgttggtaccgacattgccgatatgcgggaaggtgaaggtgatgatctggccggcataggacggatcggtgaggatctcctcatagccggtcatcgcggtgttgaagcagacctcgccgacggcgtggccttccgcgccgagaccgaagccttccagcacggtaccatcggcgagcacaaggagcgcggtcggtttgtggtccggccaggcgggagcgttttcgggggttgtcatgagccctttaaatagaggccgcacgctgcggcgtcaaagcgaaagggtgcggattcacacggcaatcccggccgatttgacaggccggaacggcctcttaatctaatgttcctcgaagcggtcgtttgcttgccgaaaatgacccggtccggagctcccgcatggacaatacgatgccgatcctgctcgtcccgggcctcatctgctcgccgcggatctttgccccggtgatcccggcgctgtggcggtgcggcccggtcacggtcgccaaccatgtcagggacgacaatatgggggcgatcgcccgccgtatcctggctgaggcaccgccgcgctttgccctcgccggccattcgatgggcggctacatcgccttcgagatcatgcggcaggcacccgagcgggtcgcgaaactggcgctgatgagcacccaggcgcgccccgacacgccggaggcgaccgctcgccgccgcggcatgatcgaacgcgccaggagcgggcagtatcgggacgtggtcgacgaactgtttccgggcttcgtgcatccgtcgcggcagggcgacgcaagcctgcgccagattgtctatgacatgagcgaggatgtcggcgccgaggccttcatccgccagcaaaatgcggtgctcagccggccggattcacggcccagcatggcctggatcaagtgcccgaccctggtgctgacctcggataccgacaacacggtgccgaattcgctgtcggacgagatggccaacgggattcccggggcgaagctcgtggtgctcgccgattgcggtcacctgccgcagctggagcagccgcaggcgtgtgccgaagcgctggttcagtggttgcggaactaggttgttctgacgctgcaaactgcctacatggagggattaccggttcaaggatacagagatgctgcgcgacgatatcaacactgcggtcaaggaagcgatgaaggcgaaggacgagcgcaagctctccaccctgcgcatggtcaattcgaccatcaagaacgccgatatcgacgcgcgcgggcagggcaagccgccactctccgatgccgatctcctgggcgtcttgcagaagatgatcaagcagcgccaggaatcggtcgagctctacgacaagggcggccgtgccgaactcgccgcccaggagcgcgcggagatcgctgtgatctcggcttacttgccgaagcagatgtcggatgacgacgtgaaggccgcgatcgcggctgtgatcgccgagaccaatgctgccgggatcaaggacatgggcaaggtgattggtgcgctgaaggcgaaatacgccggccagatggatttcggcaaggccagcggcctcgtcaaggcggcgctcgcgggatagcggcggaggcttccgatgtttcgtgtcgccgcggacagtctggaagcctatctcgcctttgatccggcacggaccgccgatctcgaacaactgcatgcggtgatgcgaaaggcggcgccttcgctcaggcggcattttcatgccggcacgccggccggtgaggccggcatgcgcatgaacatgatcggctatggcgggtttcgctacgcgatcaagtccggcaagacggccgcctggcccgtgatcggcgtggcgctgcagaagaactacatcagcgtctatgtcgcggtgacccgcggcggtaagccgctggtgtcctgctacgccggcaagctcggcgaattgcgggctggcggcaacaatttcagctttgtcgcgttcggcgatctggatgcggcgaacgtcgccgcgctgttcgccgaggccgccgacatcttcaaggcggataaggaaaatccggtccgctacatgcagggcgactgaactcgatccgggccacgtatcgccatgcccgggcttgtcccgggcatccacgtctttacaatccccccgagcaagatcgccgggcgaagctcggccacgacaagggacggaagcgacgcgcactatgctcaagcaagccgctacctacgacgagctctgccgcgatttccgctgggatatccctgcgcgcttcaacatggcgaccgcgtgctgcgaccgtcatgccgacggcagcggccgtctcgcgctggtctatgtcgatgaggatggcggtaccacgcgcacctcgttcgacgaggtcgcggacgcctcgcgccgcttcgccaatgtgctgaccgccgacggcctggtgcgcggcgaccgcgtcgcggtgttcctgtcgcaatcgctggaattgccggtcgcgcacctcgccgcgttccgcgcggcgctgatctcgattccgctgttcgcgctgttcggcgaggacgcgctggagttccgcctgtcgaactcggcggcgaaagccatcatcaccgatgaggccggctgggagaagatcgcgaagatccgcgatcgtctgcccgagctgaagagcgtctatatcgttggcgacgagacgccgcccggcaccaaaccgttctggggcgcgatcaagtcggcgtcgccggatttcgccaccgtcgacacctcggccgacgatcccgcgctgatcatctacacttcgggcaccacgggcaatccgaagggcgcgctgcatgcgcatcgcgtcgtgctcggccatctgcccaatgtcgagatgtgccacaacttcctgccccggccgggcgacctgatgtggacgccggccgattgggcctggatcggcgggctgatcaacggcctgttcgcgttctggtaccacggcattccgatggtcggccaccgcgcccgcaagttcgagccgcaggcggcgatgcagatgatggccgagctcggcatccgcaacgtgttcctgccgccgaccgcgctgaagctgatgcggcaagccgatgtgaagaattccggcgtcaggctgcgcagcatcttcaccggcggcgagtcgctcggcggtgagctgctcggctgggtgcgcagtacattcggcgtagacgcccacgaggtgttcggccagaccgaatgcaatctcgtgatcggcagcaactccaacctgtttccgatccgccccggctcgatgggccgcgccacgccgggcttcgacatccgcatcgtcaacgacaagggcgaggaattgccgcgggggcagcgcggcatcatcggcgtgcgccagccgtgtccttgcaccatgatcgagtactggcgcaatcccgaagccaccgcgaagaaatatgccggcgaattcctgttgaccggcgatctcggcgtacaggatgaggagggctatttctggtacgtcagccgtgaggacgatgtcatcaccacggcgggctatcgtgtcggcccctccgagatcgagcacacgttgatgaagcatccggcggtcgcgatgtcggcggtggtcggcatccccgatccgatccgcaccgaatcgatcaaggcctggatcgtgctgcggccgggttatgcgccgggcgatgccttggcgcgcgagatccaggaattcgtcaaggtgcagctcgccgcgcatgaatatccccgcttcgtgcagttcgccgacagcctgccgatgacggcgacgggcaaggtgctgcggcgcgagctgcgggcgctgggctagctccgcagaacaatattgatcggcgtcaatgcggtgttcgcgatcgcctgcatcgatgcgcgctcaatcattcgcggcagggctgatgtcggtctctggcaagttcgatccggtggtgcgcaggatccgcgtggcggatatcgcggaagcgctggggcaggggctgcgcgactttcaggccgtcccgctctacggattgatgttcggcgccatctacatgctcggcggcaacgtgatcctgctgtgcttgaccgcgctgggcatggtctatctggcctacccactggccgcgggctttgcgctgatcggtccgttcgtcgcgatcgggctgtacgagatcagcaggcgtcgcgaggtggatgagccgatcacgttgggtgcgatctggtcgaagctgcgatcacgcggcgaaatcggctggatggcgttcgtcacgctgttcgtgttcatcatctggatgtaccaggtgaggctgttgatcgccctgatactcgggctcggcgcctcctttgccagccttcacgactttctgaccgtggtgctgaccaccaatgaggggctgttgttcctcgccatcggcaatgcggaaggcgcggcgctgtcgctgatcctgttctcgctgacggtgatctcgtttccgctgctgctggatcgcgaggtcgacttcgtcaccgcgatgatcacgagcgtgcgcgcggtcgtgacgagcccgctgccgatgatcggatgggcggcggtcatcgtcgggctgctgatcgtctcggtgattccgtatttcatgggacttctggtgacgattcccgtgctgggccacgcgacctggcatctctatcgccgcgtcgtggtcccggtcggctcctttgccgacccgatcctgcgaagggagtgaacctcaccccggcatcggtatccccaattccttcagcgcgtccagcatgcgctgcgggggctgcatcgggatcaccatggccttgccggtctccagcatgctcttcaggctggagaggatcgccggccagccggcgcggccgccggacaggatgtcgtcgctgatcgggcgatcatgcgattgcagcaaggtcagcttcacgccgtcgccggccggctcgatctcccaggtgacgagcgtcggcccgagcttctcgacgagctgcggccagttgacgttgaatgtcacggtcagccgccgcaggggatcgcatgcgatcacctcgccggagatgtgcacggcgccgtccggcgtgcgcacgacgtaggcgccgccgacccggagatcgacctcgaccgcgttgccggaaaagtattgccggctgagctcggcgtcggtcaatgcctgccacaccttctcgggcgtggcggcaatgtagatcgcgtagacgatggccggcttgaatgtctcgatgttcatgtccgcacgtgtccttcgatagatcttcattgtcattcgaagccgtcgattccgagcgcggcgggcgggatcgcgaccgccttgccggtttcgagcagactcttgagagcagacaggatcgcaggccagcccctggaaatgccgtcaagcagcttgctgccgacgccgaagccctcatgagtcacggtcagcttcacgatcttgccgaacggctcgagcgtgaacacgactttggttgccggctccttgcgcagttcgggatcggcctcgtgcttgaacgtataggaaagacgccgcggccggtcggcctcgaggatctcgccagtgtcggtggtcttgccgctcattaccagcgcgagcggcgagccgaccttccagtccgattgcagctcggtgtcgaaccagtattgccgcgtgaacgtagttgaggtcagcgcatcccacagctgctccggcgtggtttcgatgtaggtgacgtagacgaattcaggcttaggcatggtagggctccctggcgccgctggtgagcagttcggccggcagttcgcggccggtctcgaggaagctcttcaggctggcaatgaccatcggccagccgccggagacgtcgcgcagcgtcttcgggccgaggttgtcgtgggtcatggtcagcttgacgaccccgccgtgcggttcgatgtcgaaggtcacgcgcgagacctgctcgcgctcgacgccttccttcaccacgtcccaggtgtaggcgagcttgtgcggcggatggatgatcagcacttcgccctgcacggcgcagcggccatccttggtcaactggtagggcgagccgaccttccagtcggagctggcgcgatagccgaaccagaagcgttcggtgaagtcgctcgatgtcagcgcgtgccacagcttctcggccgtggtctcgatataggtgacgtagacgcagtccggcttactcatcacgcttctccaattgtcttttcaattcgctgagcgctgccagtttcccgcgctcgaacttcctgatccatcgctccccgatctgatggatcggaaccgggttgaggtagtgcagcttctcgcggccgtgcttgatcgtggtgacgaggttggcctcctcgagaatcacaaggtgcttggtgacggcctggcgcgtcatgtcgagcccgtcgcagagctcactgagcgtctgtccgttgtgatcgtgaagccggtcaagcagcgtccgccgtgaggcatccgcgagggctttgaagacttcatccatgggccggataataggcaaccaaacggttgcatgtcaagagcgcgtgtttgggcactgccatccggcggcgcgcagatcgaaggaccacggatgtttccatgtccgctcttcacgtgcataataatgacaaagaagcagaagagcccctcatgtccctgcaagcctatttcgccttcgttgccgcctgcatcgcgctggcgctgctgcccggtccgatcgtcacgatggtgatcgccaacgggctgcgctacggcacccgtgcggcgctcaccaacgtgctgggcgcgcaggtcgggcttgcgatcgtgatcggcatcgtcgcggtcggcctgacctcgctgatggccacgatgggctactggttcaactgggtgcgctttgccggcgcggcctacctggtctggctcggcatcaagctgatccgttcgccggtcgagggcgtcggcaccgacgacaagccgccgccgccgcgcggcggcttcttcctgcagggctttctggtgctgctgtcgaacccgaaagtgctggtgttcttcggcgccttcattccgcagttcatggacatggacaagccgcatttgccgcaggtggcgctgctcggcgtcaccttcatggcaaccgcggtgctgaccgatgccgcctacgcgctggccgccggccgcgcccgcaggttcttctccaaggagcggacgcggctgatgtcgcgcatctcaggcggcttcatgatcggcggcggcatctggctggcgctgacccgggcacgctgagcccggggccgaaacggtcgctcgcgctacgtcgcgatccgttccatcacgtcgcgcaccaggccagtcagcagctcgagcttgtagccggtcatcggcagcggcttggctcccgatgttgcgagctcggcggcttgtgcgatggtcgcggcagtggccggtttcccctgcagcgcagcctcgcttgcttcgagacgcagcggcaccggggcgatgccgccggccgtgatgtggacctgctggaatgtgccgcccgatatcacggcccgcgcgcagatctcgaccagcggccattccgcgtaggagcggctgatggcgcgcttgtagtgcgcgcgctcgccggccagcggggcggggagctcgatccgctcgatccgttcgcccggcgcaaggagattgtcgaccgcgccgttgctgccatcgccgagcacgtcggtgatcgacaatccgctgtgccggtccgtggtgaccttcgcatcataggcgagcagcgccatcgccatcgttgacggatgcggcgcgacgcaagggccgagatcgaacgcgacgtgatagagatggttgccggatcgcgccggacagtcggtgccacctttcttgaggcaggcgatctgcggattgcggaaataccagcagcgcgagcgctgcgcgaggttgccgccgagcgtcgccatatgccggatctgcggcgtggcgaggccctgcgcggcggcggtgatgccgggataggcctgggcgagccgcgcatccgatgcgatcgctgcgatcgcagtcagggcgccgatccgcgccgagccgtccgcattccacgcgaccccgatcgtgtcggggctggcggtgagatcgatgacctccccgcatgacaggccgctacgacggcgctccgacaggtcggtgccggcggcgcggaattcgggtgcggacattgccagtgctgttgcggcgctcatgcggcatccctccctttcagcgcggcgacgatgcggtcgggccggatcggaatctcggtgaggcggacgccgatcgcgtcgtggatcgcattggcgaccgcggccgaggtcggcaccgttgacgcctcgccgatgccgacgctgttgccgagcacatggtcgaagccggcttcgtcgaaatggacgtcgatctcgggcgtatcggcgatccccgggatgcggtagtcctccatccccgcggtcagcacgtcgccggtgttcggatcgagctcgcgcgcctcgtacagcgcgtagccgaggccctggatgacagcgccgcaggcctggcttcgcgccagcgcgggagacgcgatcttgccgaccgcgatgccggtgtgaacgttgagcacgcggacgtggccgagccaggtgtcgacctcgacctcgatcacctgcaccgagctcggcacgccggcgccgaccgcgatattggaaaagcggcgcatcatccagccgaacaccatgccgatcaggccgacttcgcgcagcggtgagcggatgccgggtgcggtgttcttgccgtcctcgccgcgcgtctcgaccacggcgatgtcgggcgagcgcgcgatcagctcgcgccacggcgcgttcgagccgggcgcaggctttcgcgtcgcttgttcgaggatttgagccttcagcttccctaccgcttgcaacgtcgggggcatcaccgaggcggtgacgcggctgccgccggagccgggcccttcgggcagcgaggaatcgccgatccgcacatcgatatcaccgggctcgagatcgaactcgcgcgcaatcgtatcggcaagcacgctgcgggtgccggtgccgatgtcctgcgtcgcggtgctggcgacgatgcggccgcccttgaccgcgacctcgaccttcacgttgggctgccacagatagagccagtagccggtggcgacgccgatgccgcggcggtagcggccggtctgttgtggtttgcgattgcgccagatgtcgagcccggaagcccagtcgtacagccgctggcggttgggatcggggtcccagcgtttgcgcagggcgatcggatcgaccttgagccgcagtgcggcctcgtcgatcgattgctcgaccgcgaaggccatcggcggaccgccggggccacggaaggcggcgccgggcggcaggttgctgatgacgtcgaaatccgacaggtccttcgcctcggccggatagatcagccgcgccaggcccgcgatcgtcgaattggtcgcggcgccggtatcggcatgcgcggtgacggagagcgctttcaggccaccctggtcggacggcagcagcgcgaccttcagttccgcggcaggccgatagccggcaaccgagagctcttcctgccgatcgtaggtgacccgcaccggcgccttggccgcgcgcgcgagctcgatcgcggcgatcgtctcgacgccgaggctcgccttcgatccgaagccgccgccaacgtgctcggcgatcacgcggaccttgtcgtgatcgagcttgtagcgcttggcgatctgctccttcaggtgaaacacctgctgggtcgaggcgtgcagggtcagccggtcgccgtcgaagcgcgccaccgcggcatgcggctccagacacgcatgctgctgcgtggcggtgcggaaggtggcttcgacgagcaggctgttattggcctgccgcgcctcgtcgacccaactgcgcgccttcttggcgcgggtcgagaaaaccgcggtcggcccgcggatgttttgcttccacggcgccggtccgcctgcggcttccgagacattgccggcccgcttgcggctcgccttgtcgaacaccacaggcgcgccgtccttgcgtccggcgtcgagcccgaccaccgccggcagcttttcataggtcagcttgatcgcggcgagcgcggccattgccgccttgcggtcctttgcagcaaccgcagcgatcggctcgccgacatagcgcacgatcttgtcgtcgccgagcagcgacaccgctgtgacgcccgcgagcgcgcgcgccggcgcgagatcgagcgtggtgatccgcgcatgcgcctcgcgcgagcgcaggatcaagccttcgagctggccgtcatgcgtgatgtcgacggtgtatttcgccgcgcccgtcaccttgtcgcgcgcctcgatgcggggcgctgcgacattgtcgccgtcaaagcggccgacacaggcatccgcgaccgcgcggaaaatcccgtcataggcgccgcagcggcagagatggcccgacagcgccgcgccgatctcctcgcgcgagggcaccgccgttcccctggtcgcgcgccattggtcgcagaacgcggtcgcctccacgatgaagcccggtgtgcagaagccgcattgcagggcgtcatgcgccatgaacgccttctgcaccggatgcagccctgcggcgccgatgccctccaccgtcgtcaccgccttgccggctgcggcctgcgccggcatcaggcagcttgtgaccggcgcgccgtcgaccagcaccgtgcaggcgccgcagacgccggcgccgcacaccagcttggtgccggtgagcttgagctggtcgcgcacgatgtcgatcaggagcgcgtcgggatcatcgggcagggattcgacgcggccgttgacggtcgtcgtggtcatgactgtcctcctattgtcctgcgtgtcggcttgttgcggattgccgccttcctggcgggcggctgtcgtgatttcgacgaggattttgtctcggatctcgggatggcgccggcgcaaagcgtgcgcaccatgatcgccatgtccttcaggaatgcatcggccggctgcatcgccggatactgcgacttcgctgcgtacatcgacatctcgaccagccgggcgaattcggccggcgacaggtcttgcggcagcaagagttgctgcttgcgcgcgatccgcgcgatggtggcggccacgcgctccgcatggcgtgcggcataggtctggtagaggtcgcgcgcgtgcacgaggtgctcggagtacaattcctcgatatgcggcgagccgtccagcgaggcgatcatggtcgatatccgcgcggtcaggcccgcggcgaggatatcgccgagattgccccccgccgtctccgcttcggccacggctgcttcctcggctgcgatcgcggattcatggatgcgctcgatcacggcgcggaacagcgcttccttggattcgaaatgatgatagagcgcttgccgcgtcaggccggccgcctcggcgacctgctcgatcgaggagcggcgaaagccgtgccggcggaacaccagcatggtggcatcgaggatgcgggtcttcggtcccatttgacgaatttgacaaatataggagatttgtcaaatcgcgatttggtgaagcgatctagcgggctgcctcactgatgtgtgaggcgcgtcacggatcgtctcgcctggcctgcgtaaagcttcgacatgcaagggcgagccccgatcgcccggcgcttgcgaggatacggacatgacacaggtctatttccattgctcgaatacgcgcggcgtgctgatggatcgccgcggcgcctcggtcgacaacctctccgaggcctgcgaggcggcgacccgcatgatgcgctcgctggtcgcaacggtcagtctggaagactggcgcgactgggccgtgcatgtcagcgacgaggccggcgaggagatcgtgatcctgcccttcgccttcgtgcttggcaaaccgcactgaggacgcgccttgtcgtcatcgcattcatcattgctgtcgcttcgccgcggtctgaacgcggtcacgagcgcctggcagaaattgatcgcgcgaatgtgcgatccctatcggcccgaacagcactacatgcgcgggccgggtcccagatgccgcgcgaagcatgccgtccatgccgcgccggccggctgatgctgacccggtctcggcgattcagtttagaacgatcctacagttgcgcgaaatacctggacgcatcgtggcactttccggccgccctcgttgcgcgatcgcaacacgattggcgataagccctacactggacgcgttctaatcgccgtgcggctgcgcgcgtcctccatcgtgttagtgacggcaacaatggagactctggaattaggtagcgaccttgactgcgacgaccaaatccctgcggcaatggggcgccgtccacaaatggaccagcctgatctgcacattgttcatgctgctgttatgcatcaccggcctgccgctgatcttccatgacgagatcgacgatctcctgcacagccaggtcaaggcggccgacgtgccgcaaggcacgccgccggccgatctggatcatctgctcgccaatgcgctggcgcaggcgccgggcaaggtgccgcattttctgatctgggaccgcgacaatcccggcgcgatgtgggtcagcgtcggcccgacgatcgatgccgatccgaccaacaatttgctgatccggatggacacacataccggcgtctatctcgattcccctgacgtgaccggccgcttcacctacatcatgttgaaactgcacaccgacatgttcgcagggctgcccggcaagctgtttctcggattgatggggatactgttctgcgtcgcgatcatttccggcatcgtcgtctacgcgccgtcgatgcgcaagctgcggttcggcgcctatcgcgcgcagcgcacccgcgtggtgcgctggctcgacgtgcacaatctcgccggcatcctgctggtcgcctggacgctggtggtcggcttcaccggcgtcatcaacacctgggccgatctcgtcctcaagatgtggcagttcggtcagctcaccgaaatgaccgcgcactacaaggaccggccggtgccgtcgaaattgtcctcgctgaatgcggcggtcgtggaggccaagcgtgcggtgcccggcatgacgccgagcttcgtcgcctttccgggaacgctgttcagcagcaagagccactacgcggtgttcctgcacggcgatacgccgctgacctcgcggttattgaagcccgcgctgatcgatgcggagaccgggacgctgaccgacagccgcgacatgccctggtacgtgtcgacgctctacatctcgcagccgctgcatttcggcgactacgggggcatgccgctcaagatcgtctgggctctgctcgacatcctgaccatcttcatcctcatcaccggcgtgtatctgtggacgcgccgccgcaaggcgggtgtcagccaggagcgcgccatcgccaacgccgcctcgatcgacaatcccgcactcacgtcgtgatttcagcatggtcgcacatcgcacattgacccagatcttcgccgcgccgctcgtgatcgcgatcgtgagcacagtgggcctgatcagcgcgctggtcggcgacggctggtgggatgccgtctcgtgggtggcgctcggcctgcccgtgctgctctacctgctgttcatctggcagcgccggccgaactgatcgggcgacgcgctagatccgcgcttcggcgcgcagcgtcgtctcgatctcgccgaggatgcgcgccagccgttcggcccatgccgtctcgccggcctgatcggagatcaggtcctgacggatctcgatgcccgaattcatcaggccgcgctgctcgccatgcaccgggatcgtgtaatcggtctcgtcgctgaccgcgtagggctcgttgtcgccgaccacgagatcgccctcggcacgcagatgcttgagcagcagcggcggcagcgccttgtcgtgatgatacagcgtgccgatgtgccagggacgtgcgatgccggcatagaccggcgtgaagctgtgcagcgacaccagcacggtcggcatgccctgtcgcgcacgctcgtcgatgatgtggtcgatgcgccggtgatagggatcgaagatctgcgcgcggcgcatctcggcggcctcgcgcgacaggccctcattgcccggaacggtggtggcttcgctgatcagcgggaccgagcttgcgacatgcggcggccggttgcagtcgatcacgagccgcgagtagcgctgcgcgatcaaatgcgcgccgagcaggtcggagagctgcgtggcgacgccggcgatgccgatgtcccaggcgatgtgccggacgagctcgccttcgggcaggccgagatcgccgagcgaggagggaatcagcctgccgtagtggtcgcaggtgaataggaacggtgagcggccggccgcattatgttcaagaaccggtgaagcatcggtgcttgcgagcaggaaagatggaccgccaccgtaattcaagggcttttttcctcaactttgcctattcaagcggcatgctggtttggaatcgagcagctttctctatagattatgcggctcgaaatcacgatgattgtttgaagatgccgctcctgactatccatcacaagaccgtttatcgctacgcgcgcccggtggcgttcggcgaacaccgcatcatgctgcgcccccgcgacggccatgatctgcgcgtgctcgacggcgcacttgtgatcgatccgcagccaatgtcgctgcgctggatccacgacgtgttcggcaacagcgtcgcgatcgcggcctttgacgagcgcgccgacacgctgtcctttgtctcgaccgcaacggtggagcacaatccggccgacaggtttgcactgacgccggacgaccctgcgtacttctatccgttcctctacgacgacgaggaattccccgatctgcagcagttcatcacgccgcaatatggcgacccgaacggcgagctgtcggcctgggcgcggcgtttcctcgatgtcgaggcgccgacgctgaccttcaagatcctcagcgacatgacccacggcatccgtgaggcgttcagctaccgcaagcgttacgagcagggcacccagcatccgctcgatacgctgcggacgcagtccggcacttgccgcgactatgcgctattcatgatcgaggcgctgcgccggctcggcatcgccgcgcgcttcgtctccggctatcttgcgatgcctcccggcagcgcgcatggctatgtcggcggcggctcgacccacgcgtgggtgcaggtctatctgccgagcgcgggctggatcgagttcgatccgaccaacggcatcgtcggcactcgcgatctgatccgcgtcgcagtggcgcgcgatccgcgccaggccatcccgctgcatggcgtctatcttggcgctgcggatgcctatctcgcgatggacgtcgacatcaaggtcgtctcggtcggcgagagcgcagccgagcaggagacggcctgacgatgcagatcaaggtcggtttcgagatcacctacacggcggcgttgccgacaccgatggtcatcatgctgtcgatccatccgtcgcgctatgccgacatcgtcggcaccgaaagcatttcgaccgagccggatgtcccgatcgggctttatcgcgatggcttcggcaatgtctgcggccgcctggtcgcgccggccggtggcgtcacctttcgtggcagcgcgctggtgcgggattcgggattgcctgatgtcgtcaatccggcggcgcagcaggtgccgatcgagcagctacccgatgacatgctgctctatctgatgccgagccgctattgcgagaccgacaagctgaccgacatcgcctggtcattgttcggcaacacgcagcccggctgggcgcgggtgcaggcgatcaccgatttcgtgcatcaccacgtgacattcggctaccagcacgcccatcatatgaagtcggcgcatgacgtctatgaaagccgtgccggcgtttgccgcgacttcgcgcacctggcgctcaccttctgccgctgcatgggcattccggcgcgctactgcaccggctatctcggcgacatcggcgtgccgccggaccccgcgccgatggatttttccggctggttcgaggtctatctgtcgggccagtggtacaccttcgatgcccgccacaatgtgccgcggatcggccgcatcctgatggcgaccggccgcgacgccgccgacgtcgcgctcaccacgagcttcggccgcatgacgctgacgaagttcgtcgtggtgacggatgaggtggtggcggcttgattcttcccaaccattccgtcattccggggcgcccgaagggcgagcccggaatccatctcgcacagcatccgtctggtgaaatggattctcagatgcgcaattgcgcatcatagctcgcagcttcgctgcgcccccggaatgacaggttaggccatgatctccgatcttctcttcgtctacggcacgctgatgcgcggcttcgaccatccgatggcgaagctgcttgccggcaatgccgaattcctcgggccggcgcagtgccgcggccggctttatctggtgaagcattatccgggcctcgtcgcctcggacgatcccgccgacatcgtgcacggtgaattgttccgcctgcgcgcgcgcgaagccatgctgcgcgaattcgacatgtacgaggcctgcggcgaaggctttccgccgccgaccgaatatctccgcgagatgctcaaggtcacgctcgccgacggcagcgcacgcgaggcgtggacctatctctacaattggccggtcaccgagctgccgcggatcgcctcaggaaagtttctcgcgcattagcgcttcacacttcccgctcgacgcggatgtcgacctcgcgttcgacaaagctccattcctcggtggcgcgcagcatgccgaccagctcgtcgaacaggctcgcatgctcgggcgcgaattcgaaccaggtcaggaagtcgaattgcataccgaggtcgcgggcgtgaaacagctggcgagcgatcgccggcaggtatttcaaggtgccggcgatgtggtgcgacttgtcctcgaagatcgcccggcgctcctcctgggtgagctcccaccatgccgcagacttcctgatcgggatcagtgccgcgtgcgttgcctcgctgcggccgagtccggcctgcacggcggcaagcttctcgcgctcttccttctcggtgtagcgcagatggctggcgacgccggcgagccgccaggaagtctgtgccggcagcagcggcagcgcgatcgactcgctggtaacaatcgacagcgccgcgaccttcggcagcgtctcgcccttcacccgcgtgatggacgtaacctgccagccgccgctctgcccgcctctgaacgtcgtgaacatggcttatccaatcccgtaaccggggagggggcaagctcggtcatgacgatcatccccaccgtcatcccggggcagcccgcaagggctcagcccggaatccataggccggcaatgcggatgcatcgattccgggctcgacgccgagcatcgcctgggaatgacgagggtgtggataacgggcgaaggtcgataaacttgatgggttgagggcttcgtcactatatcgatgtccgattgacgccgaacccgagccagatgcgtttcacgcccgaattcctcgatgaactgcgcgcccggcttccggtctcggaagtcgtgggcaagcgcgtcaagctcaagaaggccgggcgggagtggaaggggctgtcgccgttccagcaggagaagacgccctcgttcttcgtcaacgaccagaagcaggcctggttcgacttctcgtccgggctgaacggcaacatcttcgacttcctgatgaagaccgagggcgtgactttccccgaggcggtggaacgtctcgccgcgatggcgggagtcccgctgccggccgtaacgcccgatgcggcgcgccacgagcagcatcgccgcaccctgcacgacgtgatggaactggcgaccaaattcttcgccgacacgctggcctcacgcaatggcgccaaggcgcgtggctatctcgccgaccgcgctatctcgccggcgacccagctccagttccggatgggctatgcgccgccggatcgctttgcgctgaaggagcatctcggcgctcagggcatttcgaccgaggacatggtggaggcaggtctcctggtgtccggcgaggacaagccggtgcctttcgatcgcttccgcgaccgcgtcatgttcccgatcacggatgcccgcggccgcgtcatcgctttcggcggtcgcgcgctggagaaggacgttccggcaaaatacctgaactcgccggaaaccacgctgtttcacaagggcgacaatctctacaacctgttcacagcacggcaggccgcgcatgacggggcgcagctgatcgtcgtcgagggctacgtcgacgtcatcgcgatggtcacctcgggctttcccggcgcggtcgcgccgctcggcacggcgctgaccgagaaccagctcgcgctgctctggaagatggtcgacgagccgatcctctgcttcgacggcgaccgcgccggcaagaaggcggcgtatcgtgctgcggacattgccctgccgcagctcaagcccggcaagagcctgcgcatcgcgttgctgccggaaggacaggaccccgacgatctcgcccgctccggcggccgcgctgcgatcgaggaggtgatctcggcggcgcgcccgctcgccgacatgatctggtcgcgcgagatcgaaggcggcaatttcgacacccccgagcgccgcgcggcgctggaggcgcggatcggcgagctcgccaacggcatccgcgacgaggtggtgcgccgctattaccggcaggatttgcaggagcggctgcaacgcaatttcgccccggagggcggacgtggcggctatggccgcggcggcggcttcggcaggagcaatttcggaggcgggcgcggcggcgaatcaccccgccagtttgtcccgcgcggaccgggccaggccggccggttcggcgccaagggcggcgccacccccgggatttcacggggcccctaccaggcggcgagcccgcagctcgccaacagtccgatcatgcgcggccagcgcagcgctatctcgcgccgcgaggccctgatcctgcaatgcctgatcaaccacccctggctgctgcacgatcatctcgaggaggtggcagcccttgagcttgctcatcccgaggcccacaagctcagggccgccattatcgcggcctttgcccacgaccatcatcattccccggacgtcgaggagcaggccgagaagatgcgatccgacctcgaggcgggtggattatctcatattcttcaaagggttgagcgggcgatcacaacccaggcggtgtggggcgcgcaggttggcgccgcgcgcgaggatgttttatcgacctggcgtcaactcgttgccttgcatcagaaaacccacgccttacttagggaaagaaaagacgcggaagccgccttggctgaagactccagcgaggccaatctggcatggttgcaggatatccaggcccggatggcagaagccgatgggaccgaagccctgatcgaagggttcggcgaattatcgggccggttccaacgtaatgtctgataacaaaaatgctgcggacggcgctggccgaacccgcaaaaagactcgccaaatccatggtttggctgcaaaaacagggttaagcgaaacttaatagcctcgcggctattgcagatggaaaccgtcgagacggatgacaggggtggcgagattttgcgccgccctttgtgcgtcgagagagtaaatctagatatcatgccgatgtgtgcgcttggcgccattttgcatgaccgcgtttcgggagcttagtgaatggccaccaaggcaaagacgctgcaggttaaggacaaggaaaaagacgacaaggcagcggatgcccctgagaaggattccgctgacgcgccgtcgccgttgctcgacctgtcggatgccgcggtgaagaagatgatcaagcaggccaagaagcgcggcttcgtgaccttcgatcagctcaacgaagtgctgccctccgatacgacctcgcccgaacagatcgaagacatcatgtcgatgctctccgacatgggcatcaacgtcaccgaggcggatgactccgaaggcgaggacgagaaggacgacggtgacgacgagaccgacaacgagctcgtggaggtcacgcagaaggccgtcaccgaggtcaagaagtcggagcccggcgagcgtaccgacgatcccgtgcgcatgtatctgcgcgagatgggcaccgtcgagctgctgtcgcgcgaaggtgaaatcgccatcgcaaagcgcatcgaggccggccgcgaggcgatgatcgcgggcctctgcgagagcccgctgaccttccaggccatcatcatctggcgcgacgaattgaacgaaggaaagatcttccttcgcgacatcatcgatctcgaagccacctatgccggcccggagtcgaagggcggcatcaatccgaacctgatcggcaacaacggcgccgagggcgcggcggctgaaggcaatggcggtgatgcgcaagccggggcgccggcccatgtcgcgccgcctgccgccccgccgtcgccgaccccgttccgcgccgcgcccgccggtggcgaagccggcgccgaggagaaggatcccgccgaggccgctgccgaaggcgacatggacgacgacgagttcgagaaccagatgtcgctcgccgccatcgaggccgagctgaagccgaaagtggtcgagaccttcgacaagatcgcgtccgagtacaagaagctgcgccgcctgcaggagcaggacatcgccaaccagctgcagagcgagtcgctgtcgccgtcgcaggagcgcaagtacaagaagctgaaggacgagatcatcgtcgaggtgaagtcgctgcgcctcaaccaggcccgcatcgattcgctggtcgagcagctctacgacatcaacaagaagctggtctccttcgagggccgcctgctgcgcctcggcgacagccacggcgtcgcgcgtgaggacttcctgcgcaactaccagggctcggagctcgatccgcgctggctcaaccgcgtctcgaagctgtcggccaagggctggaagaacttcgtccatcacgagaaggaccgcatcaaggatctgcgccacgagatccagtcgctggcggcgctcactggcctcgagatcggcgaattccgcaagatcgtgcacggcgtgcagaagggcgagcgcgaggcccgtcaggccaagaaggagatggtggaagccaacctccgtctcgtgatctcgatcgccaagaaatacaccaaccgcggactgcaattcctcgacctgatccaggaaggcaatatcggcctgatgaaggcggtcgataagttcgaatatcgccgcggctacaagttctcgacctacgccacctggtggatccggcaggcgatcacccgctcgatcgccgaccaggcccgcaccatccgcatccccgtgcacatgatcgagacgatcaacaagatcgtccgcacctcgcgccagatgctcaacgagatcggccgcgagccgaccccggaagaacttgccgagaagctcggcatgccgctggagaaggtccgcaaggtcctgaagatcgccaaggagccgctgtcgctcgagactccggtcggtgacgaggaagactcgcatctcggcgatttcatcgaggacaagaatgcgatccttccgatcgacgccgcgatccaatccaacctgcgcgagaccaccacgcgcgtcctggcctcgctcaccccgcgcgaagagcgcgtgctgcgcatgcgcttcggcatcggcatgaacaccgaccacacgctggaggaagtcggccagcagttctcggtcacccgcgaacgcatccgccagatcgaagccaaggcgttgcgcaagctgaagcacccgtcacggtcgcggaagctgcggtcgttcctcgacaactgattcagtcggtatccatcgaaacaagagcggcgggcctgggcccgccgtttttgtttgttgagtgatcgttatctcgtcgtcattccggggcggcgcgcagcgccgagcccggaatccattctaccgcgaaacgtgtggcccgatggattccgggctcgcgctgcgcgcgccccggaatgacggaagaagtggcaatgggagatgaccgagcgggcggatggctcgcgccgcgccgctacttcttcttcgccccgacccgctcgatcgacttgatctcgagcggcgggcggccgcccttttcggcgatctcgcggtcctggtcgcgcaggaaggcgcgcaccggctcgtcgccgtcgaggccgccaagcagctccgagggcacacggcggttggagcgctgcgagccgtcttcatagaagacgttgaagaaggcgaattcgcctttgggattggtcccgggtttttttggcatgcgcggcttgtccccgatcgtggcaaggctgtcaaagcaaatcccgcgcctttgcgcgctgggctgccctgcgcaatccggcggcgaaacgcccttgagatgcgatcggacgtagtccggcgacatgtcaagatgacaacggcctgtgggatgtccaccgttctcttgcgtcaggtcgccgtctcagccctcgaacagcacgaaggccgcccacacgctggcgtcgcgggcgccggcgaccttgccgtcgcgcgcatcgcgccgggtctggcgcagcgcatcggaataggtcaggccctcggcgaggtgctcgtagaagcgcaaggcgaagttcgcggtgccttcgtcggcgaccggccacagcgtcagcagcgcgcggcgcgcgccggcaatgccgagcgcggtcggcaggccgcgcagcccgctgacgaagctctcgtcgccgcggccggtctcgcaggccgacagcaccagcagatcgagcccggagaggtcccagtccatcagttcaaaggcgtagagatagccgtccttgtcgtcgcgcagcggccagcggctgtcgccggcgcccgacagcacgatgccgctctgccacagcgtgtcgaggccagaggcggtgctgtcgtgatagaaaccgtgggtcgccagatgcgcgatgcgggccttgccgatcgcctcgcgcagcacgccttcgctgacgccgcgtccgctcagcatctcgaccggcgcgccgcgcgcgcgggcgagctttgcgatcgcctcgatctcggtccgggtcgccggcagctgcatcggccccggaacgccgtattcgatgccgccggcgagcagcatcgcgccctgcttgtcgagcgtctcgcgcgcgtggatcgcaatcagcgcatcggggctggtcagcatccggatcgcgaacttgtcctccagcaggccgccgtcagcgtcgggcaacagcgagaacggcaccgcaaacaggaagccgtccggcaccacatagagcgtggtcttgtccttcagcattgcctccagcggcgcgaacagccgcgcgtgcaggttctggaagcggcccttggtgtcgagtgctctttcgtcgagatcaggcgcggtggcctgcatcgtccgcagccgcgcgatctcggtccgcacgctggtgtcgaccatcttgccgggatcgccgagatcgacgacgcgcggctcgctttgcgcggtctcgacgatggcgtagagcaaggtcgccgccagcgggtccttcgattgccggtccgccttccattgccgcgtgatgaagtagttgacgacggcttcccgcggggcgagcagctgcgcgggacggatcggatcttgcggcagcttcgcgccgatcgcatcgagccgcttgttcagcgccttctcggctgcgtcctgccgatgccacaccgatcgcgcccagtcgtcgatattgcccgacgagaacagctcctgcttttcgccattgagtcgcagcgccgcacgcaccagcgccgcggtctcctcgtccttgccggccacttcagtctcgaaccggcgcagcgcggtggcgtcgccgccgccgagcgtcttccagcgcagcacggcggcggcaaaggcaggctgcgccacggccgcgccggccccggtggcgaagcggccgaacgcgaacaagagatgatcggcgtgggcgcggatcgcttcggcgactgcgcggtcgccggccgtgccgacctcgcgtttcatccattcgaacatctcgcggtcgagcgcggtgaagttctgcaccgcacggttcggatcggtggcaatcaaggccaccgcgatgccgagcttgatctcgaacgagatcggatgctgcgcggtgaaggcgcgggtcgagatcgccagcgcggtttcgcgcagccgcatgcccgcacctcgctcgccgcgcgcctcgcgcttgccggcagccagcaccgcggccttgatgcgcaggaagtccgcgaaattctcctcattggcgacgatcgcctccagccgctccagatcggcttgcgatgtcggcgcgtcgccggcggcgagcatgtcggtgtagaacagccaggcgtcggcctgtccggcaaagctcgggtccttcggcgccatagcgaccgcgatggcgcgatggcggcggaaatagcggcgggcgtcgtcgaagcggccgagattgaggaaatcctggccggcattgttgaccgtcaccagcgtgttgagatggttctcgccatagtgcttggcacgcttctcgatcgcgaacagatcgagctcgagcgccttcgccggcgcgccgatctcgcgcagcatgtccgcataattgttggcgagtttccaggtggtgcgatggtcggggcccagtgccttctcggagcgctcgaaattatgccggcccagattggtcgctgatgccgccgacccgttggccgacagcgccaccgcgagtttgtcattggcgatcagtgattcctcggagccttcgccccaataggcgttgaaggccgcgattcccttcatatagagcggaaccgcttccgcgatcctggcgtgatcggacagcaggatggcgtattccagcagcacgtcggcattgccgggcggcgactgcgccgccgccttgctctggaacgcgcgcacgaacagcttctcggcgaggtcgtcgcgcttgaccgcgcgcagcgcggcggtcgcgtcgtaatactgctccatcacgaactgcgcgtcgtcgagcctgtcggcggcgtcgagcgcggcattgagttgcacggcgccggcgtcgatcctgccgccgcgcgtcagcgcgatggcattcttcatctgcgcggtgaccgcctgcgtgctgccggcaccttgtgccggcgtacgtttggcgcgggcattctgcgcggctgcactgtcgatcggcccggtcagtgtggcgccaagcgcaaggatgataccgagcgacacggcaaccctgcgcgcgcatgcgaagcgtccggcggtcgtcatcggcagcacatcctcattccagaattcgtcaccggatggcgttccccaaatgacgtcgtcgttgcagccagcatgcccggctttagtggcgcacctttgcatgaacaagaccggtgagcggcggcgcgccggtggaaccggttgaccgggccggtgccttcttggtcgcagccggcgcctccggcgttcacacgcgcgccgagatgcacccgtgtcgcgcgtccgcttcttgcatgccagcggcatgatcaagccatcggatgatgttaccgcttgcggacgcactttcccggcaaccgcctttcgcttcgacgccgaaacgcgccggtgccgaaagcattgatttttctgaccttcgtcacttgcatcatccccaccgattcgcgtatgaggcgcatccttagctccatacaacttttttcttgagagccgatccccgatgtccaacgccacaagcgacgccaacaaggcgctcgtgctcgcgcattacgacgccgtgatcaatcgtctcgatcccgatgcgatccgcgctcagctggcatccgatttcttcgaccatgcggcgggcaagcggatgagcgccgaggaggtgatcgcgtatgcgaccggcatgcacgaggccttcgccgatctttcggcggtggccgaatgtctggtggccgagcgcgacatcgtcgccggccgtttcgtctggcggggccggcaccgcagcccctggcgcggcattgccccgtccggtcgccatgtcgaattccgcggcatgacgttctggcggattcacgaccgcaagatctgcgagcgctgggccgagatcgactttgcaggtctggagcggcagctcagggattgagggaaatctgcacaactccgccgcgctgcgaccgtgatcggccgccaccgtccgcggcgtgcatcacaggataacaagccaggccaaaccgatcgcgagcgccgcggccaactggccgccgctgcgccgcttcatcgccgccgaacatcgcctcggcctggtgatggcgcagcgccgctggaccgcggggctttacgaattccttcgcttcggcgtcaagcaggcctgggcctgcctgttcggcggcatcgcggtggcgctgatgatcggcacctggcgcttctatccgccggacgctctgctcgcgcgctatgacttcctgtttctctgcatgctcgccgtccaggtcgcgctgctggccggaaagctcgagacctgggaggaggcccgggtcgtcctgatctaccatgtcgtcggcaccgcgatggaagtcttcaagacctccgtcggctcctggatctatccggagcccagcatcttccacatcggcggcgtgccgctgttctccggcttcatgtattcctgcatcggcagctacatctgccgctgctggcggctgttcgatttccgttttgtccagcatccgcgccggctcggcctgatcgctctcagcgtcgcgatctatgtcaacttcttcagccatcattacgtcatcgacctgcgctgggggctgttcgcctgggcgatctggctgttcggccgcgcaagcatccatttcaaggtctggacccgttatcgctcgatgccgctgctgctcggcctcgtgctggtgtcgctgttcatctggttcacggaaaacatcggcaccttcaccaagacctggctctatccctcgcagcggctcggctggtcgatggtcggaatcgagaagctcggctcctggttcctgctcctgatcatcagctacacgctggtgagtctggtcaatccgccgcagaagtggaggggcaagaatgccggtgcgggtgtgcggtcgcgcgatgacgcgaccgtggacagaatgtcagtgccgacgctttgactgtcgcgtttgctccatggcatgatcggccattcgaagcaggagggattgttgcatgctcaggtgtcgtttggcggtcttcttcggcgccttgctgcttgccaccccctcctacgccgcccgctgcggcggcagttttccggccttcgtgcagtcgttctcgcaggaggcggccgcggccggcatccagcaggatgtgatctcgcaggcgctcggcggggtgcagcaggatggcggggtgctcgccttcgaccggcggcagcgctacaccttcaacaagaccttcgagcagtatgtcgcaacccgcgtcggctcggggcgcatcaatggcggccgcgccatgctgcagcggcacgcggcgctattgtcaaagatcgagcagcaatacggcgtgccgcgccagatcctggttgcgatctgggggctggagaccgatttcggcaagggcgacatgggcaagctgccggtgttccgcgtgctcgccacgctggcgcatgattgccgccgcaccgacctgttccagggcgagctgctcgccgcgctcaagatcctgcagcgcggcgatctgcgtctgaacgacatgatcggcgcctatgccggcgagatcggccagacccaattcctgccgtcgtcctacatcaagtacggcgtcgatttcgacggcgacggccatgtcgatctgcgccactcggtgcccgacgtgctggcctcgaccgcgaacctgttgcactcgaacggcttcaagatgggcgcgccctatggcgaaggcagcgccaatttcgaagcgatgcgcgagtggaacagggcggtgatctatcgcaagacgatcgggtattttgccgatcaactcgtggggcggtgaccacgtcgcatccatgttcgtcattccgggatgcgccgataggcgcaggcccggaatccatcgggccgcgtcacgtgttgaggaatggattccgggctctcgctgcgcgagccccggaatgacgaactgagagttcgaggccatggaaaccatcggcagccaaaagatctggtcgttcttcgatcgccggggatgccatgtcgcgaagagctctgcggtgcgggaggggccggggcatcgcgtcggctcttatatcgagctcgccaccaagatcgccgagctgcagttcctcaaccgtgatcatgtgctgctgtttcgcggccagggcgcggatcaccgcaatatcaagaacaactcgtcgctaaagccgtcgctgttccgcggcggccgcggcaatcccgatcgcgaaacactggtgacgcggttcgaggtgctgcgtcgcgccgaacagatcctggttgccgaatacgccagggcaaaactgctcgggctcgagcggctgaagcggcatcgcatcctgcgttggtcgatcctgcagcattacgaggtctgcaccacgccgctgctcgacgtcacccattcgatccggatcgcggcctcgtttgcttcgctggcggaaaccgcgaccgcgttcctctatgtcctcggcgtgccgaatctgagcggcgccatcacggcgagcgcggaggcgggcctgcagatcgtgcggttgtccagcgtctgcccgccggccgcggtgcggccgcatatccaggagggctatctgctcggcgaataccctgagatatccggcaccgacgagcgggagaactatttcccctacgagatggatttcggccggcggttggtcgcaaaattctcgttcgcgccggcgtcgttctggaagaacgacaatttcccgcaggtgaggaagagcgcgctctatccgtcggagcagaacgatccgctgtttcagctggcgctcggggtgaagaagcagctgggcggatgatcgcgattcatcccgttgtcattctccgatgcgcaattgcgcgtctgcgggcgcgcgtagcgcgaacccggaatccatttttcctcggaatgtacggcccgacggactccgggttctcgcttacgcgagccccggaatgacggatggatgtcgtcccgggcttgacccggacccaaaaccacgactgcccgtcgtgcctgacgctgtggcctcagcttgctcaccaacgcaaccctgtggttatgggtcctggctttcgccgtgacgacgacgagagattgcgtgcaatcacctcgccgcatcgcgcgccatccgctttgccgccgtcttctccatctgccgctgcagcatcttccaatacgttccaggccggaaacgttgcagcaggtccatgaacacggcgtccttgccgatcaggatgcgcggctggtttttctcgatgccggtgatgatgcgttgcgcggccgcggccggtgtggtcctggccagcgcatcgaaacgctcgatcgactcggcgcgacgagcattgtcggtgatcccggcgccggttcgcgagttgcgcgcgatgttggtggcgacgccgccgggatgcaccacggagagtttcaccgggctacccgccaccgccagttcgtggcgcaggctctccgagaagccgcgcaccgcgaacttggccgcgcaataggcgctctggccgggcggagcgatgatgccgaagatcgaggagatattgacgatatgcgcctcgcggcgctgcgacagcagcggcaggaaggcgcgggtgccgtgcaccacgccccagaaattgatgttgaacagccattccatctgcccctgctcgatctcatcgaactggccgagcagggcgacgccggcattgttgatgacgatgttgagcgtcggatgcgcggcgccggcggccgccgcgaatgccgtgatctggtccggctcgctgacgtcgagccgatgcaccgtgaccttgcgcgggctcgctttcgcgatctcggcggcggtggcctgcaggccggcctcgtcgcgatcggcgagcgcgagatcacagccgcgcagcgccagttcatgcgcgagcgcgcggccgatgccgctggccgcgccggtcacggcggcggcggatcctgagatcgcggtcatgtcaggtcagctccatctcgacgagggggacgtggttgccgtgccggaacacggatttccgcgcttttctcaaattggaaccgaaccatccagggattttaggcatttgatctatgctcgttctcaaaactgcgatcaataagggaggcccagccatgggacagtcgaggccctgtcgtgcgaaggccctggttgtcgaagacgacccgatgcagcgggagatgataggcctgctgctcgaggaaagtgatttcgacgtgatcttctgcgcgagtgcggaggccgcggaattggtgctgcggggcgatggcgacactgtcgtgttgatgatgacggatgtcgagctggccggcaacatgaccggcgtggagctcgctcatgtcgccaagaggtacagacccgatctcgacgtgatcgtcacctcgggcaggccgttgcggcagcgcctgcccgacggcgcgttgttctggtccaagccctgggcgccgctggacgtgatccgcctcgccgagaccaaggcgtcggcgctgtcggggcgcgggtcgaggtcggtgtgacggaggtatcggcgcgggcggccggccggcggccgcttccgccggccctggcaccgtgatattggcggctgaggctccgccccgttgaggatttgaaatgacctggtctttcctgctgaccacgctgatcgtggtggcttcgcccggcaccggcgtgctctacaccctggcggtggcgctgacccggggttcgcgggccagcgtggcggcggcgttcggctgcacgctcgggatcgtgccgcagatgatcgcggcgatgctgggactggccgccatcctgcacaccagcgcgatggcgttcgcggcgctgaaatggggcggcgtggtctatctgctctatatggcatggcaggcgctgcgcgagcgcggggcgcttgccgtcgacaccgaaatcaagccgcgctcgagcgggcgggtgatcttgaccgcgatcctgatcaacatcctcaatccaaagctgtcgatcttcttcctggccttcctgccgcaattcatcgcggttgacgaggcgcatccgctgacgcggatggtcgagctcagcttcgtgttcatggcgatgacctttgcggtgttcgcggtctacgggctgttcgcggcgtcggtgcgcgaccgcgtcatcacccggccgaaggtgatggcctggctgcgccgcagctttgccgcgggctttgccctgctcggcgccaagctcgccttcgcggaacgctaaccccgcttcgccccgcgataccggcaataaaaaagcaggcctgcgcctgctgcgttaccccgtctacggggggctattgatttcgaccgattgatttcggccggtcgacttgaggccggtcacggaccggatgcccgggcagggcaagagccgctacccgggctggaattggttacttcttggcggccttcttcttggtggcctttttcgccttcgccttcttcgccttcttcgctttcttagccatagtatcctctcaaggtttcatggattgaacgcgactccgaggcatgcttggcggagggccagcctcgcaacatcctcagtatcaaactcagcagattcggaggcggctgccgcgtgctgtcacggtgccgtcatcgtgttatccacagctgttacgtgttttcgccagtttttcgccagcgtatgcgtgtcgcgcatcgcggcggtcatgcttaacgatgcgcaaacggccgacgcgcggttcttcatcaattcaaaaccacagcacggattgccgcgcggcggtgagggtccgttaagccgcgcggcctcatcctcgccgccaagacaacgcggattgtcgttgggagaaacgccttaaggggtggcggtcatttcaggggaggcggggccgatacgggtctcgaacaggggcgatgttgagcgttccgacgctttggacggtattcattatcaattttctcgcgctcggcctgatctgggcctatgtcgcgcacagctatccggctttcggcgccgcgcggctctggaccgcgtcagccttcgtcgcctccgccggcgccgcctgcgcgatgctccgcgtgatgctgacggactcgctgctgccgctgctggcggcggggacgctcatggtgttcgccgccggccttgccgcgatgggcatcaagcgcttctacggcaagccggtgggctggcgcaggaccgcgctgtccaccgcattcgcgttcgctggcctcggcgtcttcatctttgcctatgacagcctgcagatgcgcatcctggtctacaccgtcgcccaggtcatgccgtttgtgctgacgctgaagctgttgctgtcgcccgagaacgggcgcgtcagccccggcgcgcggcttgccggcgtcgtcgcctcggtgctgatcggcatctatgcgctgcgcctggtcggcgccctgctgcagcccggcgaatactccttcgttcgcttcaatgccggccagtcgctggtgatcctgctaatggtgttcctgtcgatggcgctcaatttcggcttcctgctgatgtcgatcgaccggctacgcaacgaggtcgccgacctcgcgctgctcgacgatctcaccggcgtcggcaaccgccgccatctgctgcagcgcctgaccgaggaatgcgcgcgctccgaccgcaacggcgaggcgttcgcgctgctggtgatcgacctcgacggcttcaagggcatcaacgacacccatggccacgccgcgggcgatgcctgcctgcagcacttcacgctgatggcgcagacgaggctccgcccgggcgacatgctggcccgcaccggcggcgacgagttctgcatcgtgctgccgtcctcgacgctgcgcgagggcgcgatgatcgcccgccgcgtgctggaggtctgccgcgccgacgccgagcagtgcaccggccctgacattccgatcgcggtttcgatcggcgtcgcacagtggacccgcgaaatcggcatgcatcccgaccgcctgatcgccgccgccgaccacgcgctgtacgacgccaagaagggcggcaagaacggctatgcgacctacgagccgaagctgccgcccgagatgatcgatgcgctggaggcgagcctgcgccagcgcgcctgagtgtgctaacgagggacgccactggattccatcgtcatgatgcatcgcctgctcgccgcgctgcttgccctcgtgatctcctccgccgccttggccgaaacctccgatctcgccgtcatagcgcgatcgcagggggcgcccgagattcctgggttgaagatggtgtggctgtcgccgtggggtgacgtcgccaaggcgcacccctggcgcaacatcatcgtgcaccagaccgaggggccgcagggctcggcacgctatggcgcgcaagcgcagcacaagaatccgacaaggcgcggcgtcatggtctgggtcgaaaccgacggcacggtctattgggcggtcgccgagaacctcgttccgacccacaccgacggcgccgatcgcaacgacaacaaatacatcgacaacagcaagacgtatcgccaggtcaacaaggacagctcgatcggcgtcgagttcgccggcaattatcctgacgtcaccaaggggccgaccgacgcgcagatcgcggcctggcgggtcctggtgaaggtgctgcgcgcgcgttacggcattccgctggagcgcgtctatgcccacaactggatcgacttcaaggacgcccgctattgcgaaggctgcgcgctcgcgaccatggcgcgggagtggggcgagtaggggcaggctccgtcaagtctgcggcgcctgcgttcgtggatggagcgtcttgcggataccgccgccacgcacccgagctagcccattgaatgcttctcgagcgcagtcgcgagcctttccagggcgacgtttctgcggcgcatttcgacgatatgttgttcgcagatctcaactgccgtccggccggacgaccctctacgtccacgaatgcttgtccggtaacaaatccagacccatgccgctggaaggagaatgatggcgagccatgccagcgcgagccccagactcaaatcggcgatggcgcgacggaagtcgcccttggtgaggtacgcaacggcgcgactgttgtaggcgtccgtgtagttcggatcgagcgcgatcgccgcactacagtcggcgatggcgcgatcgaggtcacctttcgtcctgtagaccagggaccgagtgtaataggcgaccgcatatttcggatagagcgcgatcacccggtcgtagtcggcgatggcgcgatcaagatcgcctttgacctggtaagcgtatccgcggttgaggtaggcgtccgcatagttcggatagagcgcgatcgcctcattgcagtcggcgatgacgcgatcgaagtcacctttcgccctgtatgcaagggcccgattatagtaggcgatcgcgtagtccggatcgagtgcgatcacccggtcgtagtcggcggtggcgcgatcgggatcgcccttggccaggtaggcgttgcctcgggcggtgagggcggctttgttgttcggatcgagccggatgccgtcgctaaagtccgcgatggcatggtcgttgtcacctttggcttgataggcgtagccgcgctcgcggtaccctacccgctttccatagtccgacagaccgccctcgaaggcccggtcaacgtccgctatcgcccggtcgtagtcgcgccgttgattgtagagctgcgaccggttgagcagtgcgccaacggcttccgggtcaatccggatcgcctcggtgtagtccttgaaggcgtggtcgacacgatcggcgaagtttgtccacgaccaggcgtaaccgcgcgcattatacaggttggaaagatctcggccattgtacgctccgtcttcgatcgcgcgtgtgcagggggcgatggtcgcggcagcgttttccttcgatccattcagacagtcctgtcggtcgtcggctgccgccggccggctgacggaggcggctgccgcgaatgccaacgcaaacagccagacatgcgcagaggtccttgaacgcatacgccccttctcccgcgatgccgcagtgctcgagctaacccggagaatgcttttccaaagccgccgcgatccgctccaacagggcgttggtgcgctgggattcgacgacctgctgctcgcagaggtcaacccaactggccccggatgatccgcgcccatgcctgcgcgagagccatatccagacgcctatcaatgcgatgaatggcagccaggacacgatcagactgaccagccaggaaggagaaccaccgccggtcttgctcatgagcgtaaagcaaacgacgagagctccgacgagtgcgatccacgaggcagctagcagaaaccaagagcgaggcttggtcattccggtcacgttggttcccacggttgattcaatgaagcccatgctatcattggttgatagacgtttcccatgccgtggcgcatgcatgtcgcaacgtggttagtcattcctttgcaagatgcccagccaccatgagcctcacgcgaacattcgtcgtcagacgaagcggtcggtgcgcgtccaagctagatcgaggtgcgcgccaaagcatcacgccaaaaatccagctccgtaggatgggtggagcgaagcgatgcccatcaatcttctgccgcgcggtgggaaggtgggtatcgttgcgctccaccgttctgcacactattcatttcgatccatcgacatcgccacggccgctgacaccagcgcagcccgtgctatggcttgacagttaaggagatcgactgtggtaaccagaccaagcggacgcggcgtgtgctgcatgcagccgcggtaggccttattgtcgatgtggcttgctcgcctgcatcggcagacaagacgatctattacactgacagttgcgtggaacgggaaagcggtgacatcggcggctatgttgtcatcgtctcggacgccaatcctctcccggtgatcaaactcagttggtctgaaggcgcactgaagcagcccgtcgccgctaaagtcactagctacgatcgacgggcaggccaattatcattttcggtttcgattgaatgggatgaaggtaagacgcgcgatattcggttgcgacggcaaagtgacgattgacgggatgacaggcacgtttgcggtgccgtgggagaatgtccggaaagccgtagaactcaaggtccggtcgcgcaaagctgcatttgaaccgacgacgacttgccgatcgagttgaggatgggggcaacgaagccataccgatcaacctcgtgctgcgcgatgggatgataggtatcgccgacaaccgcccgacccagccagccgacctcaagcgtttccctgcaggaaggctccgaccctctcgagccgccttacgggatcgagggtcgcgagcagcgcctgcttgtccgggatggaaagctcgatatgcgatgcaatcatgtcggcgagccggccagcatcgcggacccgttcgaacggcggcttgatttgcggctcacgcggataacctcgcttgattgcgtctcgaaacgaatgggccatgaaatacgctttgattgaaaggatcaggtacggcacatccggagcaggctgttcgtcgagatcatcgacctcggcgacatagctgtccgcctctccgacgaagtctttgatcatggtgcgccgatggatttgggtcagcgccttccatctgccatcggccagttggtccagggtcaggacgctgccgagaacaccgacgtcatagatgtcgccaagtccgggctcgtcgatgtcggcgcttctctggatcgcgacgacgatcggccgcgcaccttgaaaggcccgtgcaagcgcctgaatggccttggtgctgcgggtgtaaagcggcgcgatctcgccggggaacggcacgaaatcccggattggcatggcgggatggcgtcccgcctccgtggcgtgtgttgtggctgcggccaacgatccgtcacggctcgcctggatctccgccgagagcgtgttccagtcggcgacgccgagcattcttgaaaccagttccaggctctcgccgtggctgatgctgaccgttttggcagtcagcgaggcgcgcaaggtgcgggccatggcctttgcatcgcgaaaatcgcgcatgacttcgtcctttgactaggagcgaaccaggcgtgccaggcggttgcgttgctgacccggtcgctcgggcaaaggaaagccaatcaagggctcgatacgttcaccgttcccgtgagggtgcaaccagcaggtcgtatcaaccgtcacaaaatctcacctggaggcggcttggtgtcaatcatctatcgcgctgcgcggtgagaggatggggtatcgcggagtttatcatcgggccgcgcgttgcgcggacccgttggctaccccccattcttcagccaaaacaaaaaagccggcgttgccgccggctttcgtgtctgttggctcgttcgccgcgattagtgcgcggcttcgagagctgcttcctggcgggcgatcgtgcccttgacggccgactgcaccttttcgaaggcgcggacctcgatctgccgcacgcgctcgcgcgacacgccgaactcggcggcgaggtcttccagcgtcatcggctcatccgccagacggcgcgcctcgaagatgcggcgttcgcgcgggttgagcacgccgatcgcaccattgagggcctgccggcgatgatcgaactcctcgctctcggccatcaaggcttcggcgttgggcgagttgtcgaccagccagtcctgccattcgccggcttcgccgtcgtcgcggatcggggcgttgagcgacgcgtcaccgccgaggcggcggttcatgtcgaccacgtcctgatcggtcacgccgaggcgcttggcaatcagcttgacctggtcggggtggagatcaccctcttccagagccgagatcttgctcttggccttgcgcaggttgaagaacagcttcttctggttcgcggtggtgcccatcttcacgagcgaccaggaacgcagaatgtactcttgtattgacgccttgatccaccacatggcgtaagtggcgagacggaagcccttctcgggttcgaatcgcttcaccgcctgcatcaggccgacattgccttccgagacgacctcggagatcggcaagccgtagccgcgatagcccatggcaatctttgccacgagcctgaggtggctggtgacaagcttatgcgccgcgtcgcgatcatcatgctcgcgccaacgcttggcgagcatgtactcctgctggggctccagcatggggaacttgcggatctcggcgaggtaacgtgaaaggccggattctccattgagaaccggcaacgtagctgtacgggccattcgagcgccctccagtggttcaggcccccgatagcggcgggcccggcaggtggccgctgggttaaagccggccacgctgcgatgttccgcgctggatattcagcgcaggtgcaacatacactaaacggtccgtgatagggaaggattgctgacgtcacgtccccgtgtgccagctataacgtgttgtcatagctaggcttttccggagggggtgcgtcataccgccgctgccagcgccctctgcaggagaagcaaatcctccggcaggggcgcctcccagtgcaaaagttccccggtgcgggggtgttccaaagccagcagataggcgtggagggcctgccggtcgagggcggtaagtgcgtctttaccttccggcccgaggtggccggccttggtcttgaagtgcgggccgtagacggcatcgcccatcaggggatggccgagatgggcgaggtggacccggatctgatgggtccgcccggtctcgagccggcaggccagcagcgaggcgaccggcttgccgtcacggccggcaaagctcgtcagcacctcgaaatgggtgatcgcctcgcggccgccctggcgcaccgccatcttctcgcgggcgtgcgggtggcggtcgatcggcgcgtcgatggtgccgtgcggccggttcggcacgccccaggcgaacgccatgtagccgcgctccatcgggccggtgcggccgtggtcggcgaattgcgcggtcagcgactggtgggcgtggtcgttcttggcgaccaccatcaggcccgtggtgtccttgtcgagccggtgcacgatgcccggccgattgaccccgccgatcccggacaggctcgagccgcaatgggagatcagggcgttgaccagtgttcccgtggcgtggccggccgccggatgcacgaccaggcccctgggcttgtcgatgacgatgatgtcgtcgtcctcgtacacgatatcgagcgcgatatcctcgcccttcggctcggcgggcgcggcctccggcacgtcgattatgatcgtatcgccactggcgacatgataagcggggtcgcggacgacggcgtccttgacggtcacggaaccggcgaggatcagcgccttcagccgggaccgcgacagctccggagtgcgctgtgcgagcacgcggtcaagccgggccgagccctcgtcgcccgcgacgatgacctccagcttccgaccgccattcgaagagacctgctgcgaagtaacttgcaaagatatagagccttgtgatgaccgacaccgctgtgaccgaaccgacccccgaccaggccgcgctgatcgcgcgggtgcggcgcatgatgctgatcgctggcctgacctcggcactggccgtggcggtcgtgttgatcgccatcggctaccgcctttatcgcagcgagggaagccctgtttcggtctccgatgtcactgctgcgctgccgaagggcgcccgcatcgtcgcaactgccgtcgccggcgaccggctgctgctgacgcttgatataggcggtgcaacagagatccgcacatttgatgcaaagacgctgaaacctgccggcaggctgagcttcgtcaacgagccctgatgctcgcaatcgcgaagccgcgtgctcgatcaaccaaaagctgcatagcatagtctgcatagtttttgcgccagcgttcgcgcatcgagaaggcgtgccgccatcttttcggccgagttgcacgttcagcttgcgccatgtcgcaacccaaccccagcgcttccatcgaacagtccggtgaatccgatgcagtggggtcgtgcaacggtccgacgcgccgcgcggtgttgaccgcgatcgcgggctgcgcgtgtctcgccgcgatcgagcctgcagccgccgacgatgaagatcagcccggcgccagtgagcgaccgcaaaaagccgatcagctggtgcgcgccgaaggcgacaaggccggacaggtcatcaagtcggatgatctgaccttgggcgggccgccgattcgcgcctggccgcaggacccgaagacctcggtcgtccgcaagggctcgcggctcaacgaggtcgtactcgtcaagctcgatccgagcgaactggacgacgccacgcgtgcgcgtgcccctgacggcatcgtctgctactccgtcatctgctcgcatgccggatgcccgatcaccgcctgggtgaaggaaaatcagggcgacaagaacgttctgaaatgtctctgtcacaactccgaatacgatccgcgacaggatgcgcaggtcgtgttcgggccggcgccacgtcgcctcgcggcattgccgctgacggtggccgacggcgcgatcacggtcgcagcgccattcgtcggaaaggtgggtgctcagcagggaggatgaggccacatcgagatatctgcatgacctaaaaaacaaaacagagcagagcagggaggtagcatctcatgacaagcaagcagtggttattgtcgagttgtgtcgcattcacgtgcctcgtgtcgacctacgccgtcgcagggccgatcgaaaactacagttcggtgacgtctgcgcgtctcgaaaatcccgaacccggcaactggatgctctatcgccggacctatgacggacagggcttcagtccgctcaaccagatcaacacatccaacgtcaaggacctcaagccggtctggaccttctcgaccggcgtgatcgaaggccatgaggcgccgccgatcgtcaacaacggcgtgatgttcgttgcgaccccgatggggcaggtgatcgcgctcaacgccaagaccggcgaagagtactggcgctacaagcggcagctccccgacgatctgttccagctgcatccgaccagccgcggcgtcggcctgtgggaggacaagctctatctcgcgaccacggacgaccacgtcgtcgcgctggacgccaagaccggcaaggtggtctgggacaccaaggtccaggactacaagaagggtcagtacatgacgctgatgccgctcaccgtcgacggcaaggtgatcgtcggcggctccggcggcgagttcggcgtgcgcggctatgtcgccgcgttcgacgccaacagcggcaaggagctgtggcgcaccttcaccatccccggcgagggcgagcccggccacgagacctggagcggcgacgactggaagtcgggcggcggatcggcctggatgaccggcacctacgacaaggacaccaagacggtctattggggcgtcggcaacgccgcgccgtggcccggctcgatgcatcccggcgacaacctctataccagctcggtgctggcgctcgatcccgacaccggcaagatcaagacccacttccagtatcaccagaacgattcctgggactgggacgaggtcgatgcgccgatgctgatcgacatgcagcgcgacggaaagtcgttcaagagcttggtgcatcccggccgcgatgcgatcttctgggtgctcgaacgcaaggcggacaagatcaactacgttgccggctggccattcgtgaagaccaatgtctggaagggtgtcgaggccgagaccggccgtccgatcctcgatcccgaccacaagccggtgctcggcaagcgagtcgagttctgcccgtcgctgtggggcggcaaggactggccatcggcgtcctatagcccgaacaccaagctggtctacgttcccgccaacgagaacttctgcggcggtttcaccggcgagaagcaaccgctggttcccggccagctctggctcggcaccaagccggaggacatcgggctgatccccgcgccgaatgccgatcatttcggcgagttgcaggcgtgggatccggccaccggcaagaaggtctggcagcacgactacaagacgtcgcagctgttcggtgcggtgacggcgaccgcgggcgatctggttctcgccggcggcaccaacgaccgcgccttccgcatcttcaacgccaagaccggcgagctgttgtgggagcagaagaccaactccggcatcatggcgatgccgatgtcctatgaggtcgacggcacgcagtacatcgcagtccagtcgggctggggcgtcgacgcgcagcgcatccaggacgcgctggccggcaaggtcaagggcttcgagaacaacgtcccgcaaggcggcgtgatctgggtgttcgcgctcgacaagaagtagcgcggggtccacggatagggggcgatgcgatcgggaagcggcggttggggagaccggccgcttcccggtccgcccgttcggctattttcccttctcgtcgaccttccgcttctcgtcgtcgttcatcttcttgatcgtcggatcacgactggcctcaccggtggtttggtcggtggtcgatggtgggccgttgctcggaaccgaggtctggtcgggcagcaccctggccggacgcgttgccgttgtgctcggcggcgaagctgtttgtgcgaaagcctgcgctgcaaaaagaaagacgcccgcgaacaaggctgccgcgagcgtcccgattgtttgaggtggggttctcatcgatctgctccagtggaccgatgagaacgacccgtctcgcctaacgttcctacctcacgtctccagctgcttgccgatcggcagggcgcggatgcgcttgccggtggcggcgaagatcgcgttgatcagcgcaggcgcaaacggcggaacgccgggttcgccgacgccgctcggcggcgtgtcggcgccgggcggcacgatgaagacgttggtgatcgcaggcgactcgtcgatccggatcaccgggaagtcgtcgaaattgctctgctgtaccttgccgtccttgaagctgatctcgccgtatttggcgaggctcaaccccatgatcgcagcgccttcgatctgcgagtggatccgctccggattgacgtaagtgccgcaatcgatcgcggtatcgaccctgggcaccgtgaacttgcccttgtcgtcgaccgccacctcgacgatggtcgcgatgtagctgacgaacgagcgatgcaccgcgatgccgaggccgtggcctttcggcacggtccggccccactcgcccttttcggcgaccagttcgaccaccttgcgcagccgcgcggtgtcgatcggatagctctcatagggctcgccgtagttccagggatccttcaccgaggacaggttgacgatccgcggcgatccgatcagttccagcagcatctccttctggtcgcggcccgtcgcatgtgcgatttccccgaccatggattgcaccgcgaaggcgcgcgggatgttggacaccgagcggaaccagccgatccgcgtgaacgcggccgcttccggattctcgcattgcaggttggcgatctcgaacgggttgtcgatcaggcccatgccgagctcgaacggcgcttcgtgattggcgccggcggcaaaggtcgaggcgatggtcggcgccacgctgcggtgccgccacgcgatcaccttgccgctcttgtcgagaccggcctcgatccgttccaccgacaccgtgtgcaggaagtcgtgatggacgtcgtcctcacgggtccactgcaccttgaccggcgcaccgagttccttcgagagcaacgccgcctccagcgcgaagtcgcatttcgacttgcggccgaagccgccgccgagcagcgtcacgttgacggtgacattgtcctcggggatgccgagcgtcttggcgacatcctcgcgggtgccgccggggctctgcaccggcgcccagatctcggccttgtcgcccgtcacattggcaaccgcgaccggcggctccatgctgacatgggcgagatgcggcaagtaatactcgccggtgatgaccttgtcggcgttcttcagcgcggcatcgacatcgccttccttgcgcaccacgaggccgggctttcgcgcggcctcttcgagggatgcacgataggcgacggagtcgtacttggcattggcgccgtcatcccagacgatcttgagctggtcgcggcccttgatcgcggcgccggtgttgcgcgcgatcacggcgacgccgccgagcggctggaacttggacggccagggccagcccttgacctccatcaccttctcgacgcccggcaccttcattgccgcgctgtcgtcgaacgacttcaccttgccgccggtgaccggcgggcgggcgatgacggcgtatttcaggccgggcagccgggtatcggcgccgtaatgcgccttgccggtggtgatgtcgtgcagatcgacgatcgagacctggcccttgccgagatagcggaagtctttcgcctccttcagcttcaggcccttgatatccggcaccggttccttggcggcgtcggcggcgagatcgccgaagcccgccttgcggccgctcgcgctgtgcaccacttcgtggttctgcgccttcacttcagtgaccggcacgccccacttcttggcggcggcagcttccagcattgcgcgcgcggcggcgccgatctggcgcatcgggatcagatagtgccgcgtagagcgcgagccgtcggtgtcctggttgccgaacttgacctcgtcgccatgcgcctgctggacatggacgcgcgaccagtcggcctccatctcctcggctacgatcaggggcaggctggtgcggacgccggtgcccatctcggagcggtgcgccaggatggtgacggtgccgtcgggggcgatcgcgacgaacacgcgcggatcgaccacgacgccgtgcggcatcttgccggctccggtctcataggcgaacgcctggcgcgtcatcaccggtgcggcgagcacgaaagagcctgcaacgccgagccccttgaggatgctgcggcgcgacaggttctcgaccttcgcatgcttctcgaagccgcgaagtctgttcggattggtgcggatgttcatgtcacacccccgtcgacgcgagatgcacggcattctcgatccgctggtagcagccgcagcggcagatattgcccgacatggcttcgcggatctggtcgtgattcggcttcgggttctgggtcagcagcgccgcggcctgcatgatctggccggcctggcaatagccgcactgcggaacattgacctggcgccaggccttctgcaccggatggtcgccggtcgggtgcagcccctcgatggtggtgacctcgcggccgacgacgtcggagaccgaggtgatgcaggcgcgcaccgcctccttgtcgacgatcacggtgcaggcgccgcacagcgcctggccgcagccgaacttggtgccggtgaggccggcttcgtcacgcagataccagagcagcgaaagatcggggtcgccgtcccaattctggtcctggccgttgatttttagtttgatcatggtctgtcctcgctctgcctaagctattgaccggttgcggcgcgagatgcggaacgtcttccctcacctgcggccgcgctgatgtttgttttgccaagatgtttgtgaagatgttggtgagccaaatttgccgtgcgccaaggttctgcgctttgttccaagcactcctctcgcttctcgagcgccttgcccggcgcagcatggtgaaggacttgcgatgttagcagagcaaggcggcgagtgacttcacaggcaggtgttttgcatttccatttggcgaaagcagggccgtgcacgatcaagacatgacagccggaggtggccacgatgcaatcggcggctgcatcgctatatcccgtgcggatgcgacgctggggtctcggcggggcgcagggagccctcccgggccgcttccgtgccgaaaccatgggcacggcatggtaagcatggatgacaaaatccacgccgcaatgcacaagccatcttgcggcggggggatttcaaggctattgcctgtccctcaacgctcccttcgtctagcggttaggacgcggccctctcaaggctgaaacaggggttcgattcccctagggagcgccagcaaactcaggtacttaggtagccatcggcctcgttcgttgaataatggttgaataagacgctggtgaacagcggcgaacgcttggggaatttgccgccgacatcagcagaccattctcggcgcgatgcctcactgtggctggcgcattcgcgaaaatttcctcgtcgcccttggtgtccggaaatattcaaaccatcgctgtcgtgcgctgtcgtgcgcgagcgcgctcgggtgctcgcattgacgttgctcgttgcacaatcaactcttgtcctgtcgagccttgtgcgaattggagagctacgtgagatacaatcgacgagagaaaactggcggtcaacagtcacaagtcagtctattcgctccgaaagccgcagaatcgagcacgatgccattcgcccagcggctcacctgcacgattgacgatgcatgcgaagtgaccggcttgggacgtacgaagctttatgagttgataggagctgggcgtatcgtcacgacaacgatcggacgtcggcgactagtactggtgcgctcacttctggcgctccttgacgccaacatgtcgaactagtggacgtgcgacttaaggaaacaacctcagctaggctgaactcggtccattccgcctgtcgcaactcgccagatcgcacaaagaccagcggaggcagtttcagcgcataagcgattgcacaagagtcgagttcataaggcatcatgacgtatttgtgcgctgggtggatgtaacgatcgcgagaaggagggtatgcgtgaaatctgcactcttcttgtgtcatgcctcgaccgaatcctgggcactgcaaacccaaaaagaacagaagaaaataacatgaccgcaatcatactgacccgcgtcgatgagtgcaggcatatggcgcgctactacaagctggatattaagcccacgctgtttggcgagtgctcgcttgtgagaaggtggaggcgcattgggcgtgccggcactgttcggatcgaaacgtattcgtcccaagggccgacatagctatgatttcaaaataggcgcaaagcagaagcgaggctatcggtgaaacagtccgaagtgaattggagagccggcattttccatcccctacactccggaacaatcgcccaggctaccgggcggtgacctgagcattttgctcgaacgtgatcccagttaggccaatgtgtagccgatagccgctgtgggcagccaccatcaccatcaccagcagggctaccagggccgccagtcggtctttattcagtttgcccggatcgtttaaaccgttcggggtcatagtgtagctctgcctttccggacatcacctctggaaccagccgcaacgcggcgtcgattacctgcgagcggttcatgcccagccggctgcacacctcatccagttgcttgaggcgttcgtccgaaagtcgaactgaaatcacgcgcttggtcatgtccaaaacatacgggcaattcctaaatgaaagcttaagtatgtaatacgccgtacgcggacgggacttgccgccatctgttgccgggaggactcgggtcacagctttttgcccgctctggccgcaaagcgggtggtcatcgcggcttcttcggcgctattgtgattcgatgaggtcgatcgctagcgaagattcaacggtttgttgggctgtatcgcggcatattagggccgcgcccctcctgaggatttagtcgtgcgagatcgggatgtcagacaggctctgcaccgaaaggtgctgaaagagcatcacggcgacgccgacactttggtgctcgacgagttgggcctgcgtcatggcacctgccgggtcgatatcgccgtcgtaaatggctacctgcacggttacgagatcaaaagcgattcagacacgctggaacggcttcccgcccagatcgccacttatgggctcgtcctggaccgggcgacgctcgttgtcggcgagcgccatttggagaaggcgaagccgctgatcccgcaatggtggggtatcaaggtcgtgacggcgggaccgcgtggcggcatcagcttcgagactgcgcaggcctttgcgcagaaccccaccatcgatccgctcgccctggccgaattgctctggcgaccggaagtcgttgaaatcctccaggagcgcggcgcaccgccggctttgctcagaaaaccgcgcggcgttctctacaaatacctggccgaaaccgtcgacctgcaggagcttcggccgcttattcggcagcgactgaaagcgcgtgcgcgctggcgaggtcatcgaccaccttcgtcagatgccggttcgtcgacacccacacccacgtcgacagatttcccgtcgtgacggtgcctgccgcgcagtccgcgatataggcgtcgccggccgagaacgcgcggccactgaaataaggcagggcaaccagcgtcgcgcacatctgctggtactggccgaagccgtgggtccgtaccggcgtcccgcgggcgacatgccagtggtcggtgatggtgtagcgcagcttcgcgaacggcttaatcatccgcatgtcgagctcgaccaggtcagggtgggcgacggcgtagtccccgaaggtcggtatccgcgtctcgtgaccgatggttgcgatgaacgcgcgataagcctgccattcatggcgcggcagcaactggtacggcgcggcgatgttcgccaccgagttcgggtaggacgtgccggcgatggtgacggtgcgccattggttgagcatggggacccgggccatcagcgtctgcatgatcgtcaccatgatcgcgatcggcacataggtcggcgtgccgagatcgatcaccaggtcgcattcgccatagccgtccgccatggggcgcagcaggttctcgatgtcggcctggagattgtgccggtcgaagtcgggaagggacaggcgcaggcagacgccgcgccggtcctgccgggaaacggtggccacggccgccaggaatgcggcgtcgtttgcgaaactgacgaccgggatggccgcgcagccttcggcgcgggcagtctcgaacagaacctcgacgcagtggcgtcccccagcgcatcgggtcgccgcgggcaggtgcttcaagtcaacaaagcagggccgggcctgccacttggatttcaggcgcttgccgaagtcgcccaggtggtcgtctgcgctctccttgttccgctgcgtctcgaagtcgaacccgaccggggggatttcgaggaggggggtgatgcggtccttgaccggccccgccaggcggctgagcgcctggtactctcccattttccatttcaaaattggcacgtaatggcgatgattgaacacaaaggcctccagaattgattacaaaatggcgtcaccacaatcaggctggcatttatgtagacaattttgatggaactgtcaatcggctccccattttgttgcgaaattttgactgcggtcccaaaaagctcgccatgaagggccggcccacgatggacggtgcatcgcggaatagctcgcattttcaacgggctaaattgggaaaagaggcccggagcggatgctcgatcgggcctctctaaaaacttgcgagagtatgcaaatgaggacccaagcgggcgtacgtctaacctctagcctttcgagacatcctgtccctgtaacggccgctggtttctcgattgggtcaagctgcgaacggctccgtgctcgaatagcggtcgattatgagccagccaagctggccccagcgtcgacttggggtaacgtctcgccatgaattacagcgaatacattgtctacatcgacgaaagcggcgatcacggcctcaccaacatcaacccggatcacccggttttcgcgctcgccttttgcgtggtcgaaaaggccaaatacatcgaaaagatcgtgccggctttccagcggttcaaattcgacttctggggccatgacagcatagtgctgcacggtcatgaaatccgcaaggcgaccggcgatttcaacatcctgctaaatcctaacacgcgggcatcgttcatcgaccgggtaacccagctgatcggcgacgctgaattcacactcattgccgcggtcatcgacaaggctaagcacgtcaagaaatacagcgacccggcggacccctacagcattgccctgggcttctgcatggagcgcctgcagcgtttcctgatcgacaagggccaggcgaacgtccagacccatttgcaggtcgaatgccgtggcaagaccgaggatgcgaagctggagctggagtttcgcaggatctgcgacggtcaaaacgccgtcggcaagatgcagaacctcgaaatccgcttcatggacaagaagcacaactcgaccggcctacagttggctgaccttgtcgcacaccccattgggcgccacgtcatcaagccagatcagcccaaccgggcctatgatgccctgaagtccaaatttcgggcgagccctaacggcaagatcgagggctacggcttgaagattttcccctagcccaaaaagcgaagggccccggtgttcaccgaggcccagcgccgatcgagcattcccaatccatttgatccctaaataggacgttttgtcctaaaagtcaaggtgtccccgagacccttgcgtctcccccgggagaccccaaaatctaggcggggcgactttaaacacttccccccggaagaccggcccgccctccaaaaaaggatacgcataatcacacgtcattcccatacgcccattgcagcattccaatacgcatagggggagggctccagggtctccccggcgaagttgcgcaacggcgaaacacgctcatattggcggcaacacgttgtttcgggaaaacactatgtcgaacacagtgcggattccgacgaagtcgcccgggtgtaccgatatgaagtcgcccggggattccgagacgatgtcgcccacctctccgatttgatctcgcccgggggcgaggcgttctagctgctgaggttctctggcattgggcaagccgcacggtcaactggaatcgcggcttgagcttgttgtgtttctgttgcgtttgctgtgggcatgtgggcaacgccttggcgttgtccaagcgcagcggcatgtccacagcgtcacgggctcaggtctttcgggcggattgccgggttcggcgcaggctctcgccagtaaggtcgagccgatgggcattgtggacgaggcgatcgagcacggcgtcggcataggtaggatctccaatgagcacatgccactggtccacggggagctggctggtgacgatggtggaacgatgaccatagcgatcttcgaggatttccaggaggtcgtgacgggcaccagcgtcgagcggctcgagcccccagtcatcgaggatcagcagatcgacacggccgagcccgcgcaataggcgcggatggcgaccgtcgccgcgcgcgagagcgaggtcatcgaacagccgcggaacacgttgatagagcacggagcgattgtcacggcaggccttgtggccgagcgccgaggcgagccagctcttgccgacgccggccgggccgcagatcagcaggttggcatggtcatcgatccagcggccctcgacaagcttggcgaacagcgggcggtcgaggccgcgcggggtgcggtagtcgatgtcctcgacgcacgcttgctgacgcagcttcgcatagcgcaggcgggtggcgagccgcttatcgtggcgcagtgatgcttcacgttcgagcagcagcgcgagccattcggcgtgaccgaggcttgcggcctcgccggttgcttcgatatcgacgaaggcattggccatgccgtggaggccgagggcgttgaggcggtcgagggtcggatgggtgagcaagggatggtctcctagttgtagtagcgcggtccgcggatgttggcatgcaggatcggcgcatcgtccgcggagcgctgatgagcgggacgccgatcgagattgttggcgaggatcgatttgaccgagccgtaggtgcgcgcgccgatgtcgatcgcccgcgcagccgcggcgtccagccgtccgcgcccataggagccggcgagcctgaggatgccgaggcaggcgcggaagccttgctcggggtgcgagcgctcgtcgagaatgaggtcgcacaaagcgctggtcgccggcccgatcgcggcagcgtcctgtcggatgcgcgcgatggtccagccggcgtagcgccgatggctggaggccatgtgctccggcacggtggtgtgtttgtgattaccgctcatgcgctgatgcgcggcgatccgctcgcccttgtggaagatctctacggtgcgggcagtgaaccgcacctcgacctcggcgcgcacaaagcgatgcgggacgctgtagtaatgcttctccacctcgacgtggtaatcgaggctgacgcggcggatccgccattcggcgagtacgtaggggctcgccggcaatggcttgagcgccggccgatcgacctcctcaagcagccggcggcgcgtcacgccgagccgccggatcggccgctcctcgttgagcctggtgagcagctcgccgatcgccgcattgacctcggccaggctgtagaaggtgcgatgacgcaggcggccgagcagccagcgctcgacgatcaggacggcttgctcgaccttggccttgtcgcgcggcttgcgcggccgggccggcaatatggcggtgccgtaatgcgccgccatctccgcataggtccgattgatctgcgggtcgtacaggctcgccttgatgaccgcgaccttggtgttgtcaggcaccagcagcgccggtatgccgccgatcgccgcgaaggcgccaacatgagcgctgatccagtcggcgagcccctgcgtccacgtcgcctgcgcgtaggtaaagctcgaggcgccgagcacggcgacgaagatctgcgccattctgcgctcaccggtgagacgatcgaccaccaccggcacgccgtcgccggcatagtcgacgaacagcttgtcgccggctgcgtgcgcctggcgcatcgtcaccgacaggcggccctcccaggcgcggtaaagctcacagaagcgcgagtaccggtatccgtcgggttcggcggcgatgtactcctcccacaggatcgacagcgtcacgtgcttgcgcttgagctcgcggtgcacggtcgtccaatcaggttcggcgatgcggcggtgaccctgccggttgccattgccggtcttggcgaacaggcggagttccagggccgcgtccgtgagctcgtcgggcaacggccaggtcagacccgcggcctcgaaccgccggatcgccagccgcaccgtcgagggcgccgctcctacccgtcgcgcaatctcgcggctcggcagaccggccgccttcatcctgatcacatcgcgcacacggcgcatcgcaagcctctccgtcggcatccagggtcccccttcgcaaagccgaaagggttgacctatgggagccagaagaggcctcgtcacccgggcgacatcatcccggaatggtgggcgacatcatctcggaatgggtgggcgacttcaaatcggaatggtgggcgagatcatctcggaatgctgggcgacatcgagcggaatccgca

SEQ ID NO: 18 - DNA, 154775 bp, Bradyrhizobium enterica
cagaggtctttgctgctcaagtgttgcacttcgagtgtgaatccacctcctggctttcgccaggacgacaccgaatattcaactgccatcaccacgcatcaatacacggccgcttccgcgtcgcgcgcggctccggcttcggcaccgagcgcaggccggccatgatccagtgtcgcgtgtcggcgggatcgatcacctcgtcgatctcaagcaccgaggcgatcgagaccgccttgccgttggcgtagagctcggcgaccttggtctggaaatacttctcgcgctcgaccgggtcctcgatcgcctccatctccttgcggaagccgagccggacatagccctcgaggcccatgccgccgaactcgccggtcggccacgccaccgtgaagaacgaagcgtggaagccgccgccgatcatcgactgcgcgccgaggccgtagcccttgcgcagcacgatgccgaacagcggcaccgtgatgctggcgccggtgacgaacatccgcgcgacatggcgcacgatcgcagtcttctcggcctcgggcccaaccatgaagcccggcgtgtcgcacagcgagacgatcgggatatcgaacgcatcgcacagctgcatgaagcgcgcggccttgtcgccggccggcgcatcgatcgcgccgccgaggtgcttcggattgttggcgatcaggccgaacggcttgccttcgatgcggatgaaggcggtgatcatgccgacgccgaaatcgcgccggatctccagcacagagtcttcgtccgcgatcaggtcgatgacattgcggatgtcgtagacccgaagacggttctccggaatcgcgcggcgcagcagccgctggtccggcgccttccagtcggcgacggcgccctggaagtaggacagatatttctgcgccaccgccgtggcctcttcctcgtcctcgaccaggatgtcgatcacgccgttcggcgactggaaggaaaccgggccgacctcggccggatgatagacgccgagcccgccgccctcgatcatcgccgggccgcccatgccgatcgaggcatttttggtggcgatgatgacgtcgcagacgccgagcatcgcggcgttgccggcgaagcaatagcccgagaccacgccgaccaccggcaccagtcccgagagttttgcgaactgcacgaaggacggaccgtcgaggccggtcatgccgagccggtcggtatcgccgggacggccgccgccgccctcggcgtagaacaccagcggaagccgccactgctcggtcagcgacagcatgcggtcgatcttcttgtggttcatatggccctgggtgccggccagcacggtgtaatcgtaggagatcaccatgcagcgcgcgccttcgggaccgaaatgccccgcattgacggtggcgacgcccgcgatcagaccgtcggccggggtgttcttgatcaggtcctcgaccttgcggcggcgacgctgggccgcgatcgcgagcgaaccgtattcgacgaacgagccctcatcgaccagctgcgcgatgttctcgcgcgcggtgcgctggttggtcttgcggcggcgctctaccgaagccggacgattctcgtccagcgtgatcgccttgcgcgcgatcagctcggcgagatcgggacggatgtgatcgagatcgatcgcggcctcttccgccgcgtgatggccatcgacctcggccggctcgagatacaggatcggatcgccatgcatcaacgtgacgccgacgccgcccgcgatcttcgtcacccggccgccatgcggtgctgcgaccagatgctccatcttcatcgattccagcaccgcaatctgctggccgggtcgcaccagatcaccttccgcgacctcgatcgccacgatcgtgccctgcagcggcgcgggtaccgggagcgatccttccggggcggcttcgatgacaacggccttcgtcgcggccgcctcgctcacctcgagcagcggcgcggcatgttccttcgcggcgccgaccaacgccgccacgtgggtatcgatgaagttggtgctgatcttgttccgggcaaagctctgatgcaccaggatggcgccgagcaaggggatgttggtggcgacgccgccgatgcggaattcccgcaaggtgcgcgccgccttgtgcaccacgtcggtccatttcgggctcggcgaatgcacgatgacttttgccagcagcgagtcgaacgcggcgctggtccggtagccggaatagccgaacgtatcgacccggacgccgggcccggacggcaggtcgaacacgctgagcgtgcccccggtcggcttcgtcagccccttctcgtccatcacctccatattgacgcgaatctgcatcgcatagccgcgcggcagcggcacggccgattgcgcgaggccaagcgaggccagcgtggcgccggccgcgaccgcgagctgcgaacgcacgagatcgacgccgagcacggcctcggtgacggtgtgctcgacctggagccgcggattggcctcgatgaaggcgaaggcgccctcgccttcgccggcttcgtcatcgaccaggaattcgaaggtaccgagattgtcgtagcgcgcggcggtcgcgagctgctttgcggcctcgatgatgcgcgcccgcaggctctcgctcagggacgggctcggcgccacttcgatgagcttctggttgcggcgctggatggtgcattcgcgctcccagagatgactgatcgcgccgtggcggtcgccgatgatctgcacctcgatatggcgggccttgcggatcagccgctcgacatacacagcatcgctgccgaacgccgccttggcctcggactggcagcgcgcataggcttcgtcgagcttggccaagtcctcgaccacgcgcatgccgcggccaccgccgccggcgatcgccttgatcatcacggcggcgttcgtgccgagggaggcgaagaacgccttagcttcgtcgagtgaggttgcgcccgaggtgccggcgatgatcggcacgccgcatgttttccccaattccttcgccttggccttgtcgccgaacagatcgagcgcttcgggcgacgggccgacgaaagtgatcttctcctcggcgcagcgccgggcaagctgggtgttctcgctgaggaaaccatagcccggatgcaacgcgtcgcagccggcggccttggccgccgcgatcacggcctcgatgtccagataggcccgcgcgccacgcccggggatttcccgcgcctcgtcggccgagcggacatgcagcgaagccgcatcatcggcgggatagatcgcgaccgtggcaaggccgctatcggcggcggcgcgggcaatccggatcgcgatctcaccgcggttggcaatcagcaatttcttgaaggacatggtggttccgtgcgtctcttgggcgaccgataatcttcttcacctcgccccgctcgcggggagaggtcgaagccgaagcgaagcgtagggttcgggtgagagcgagtctccacaagcgaactcgcggacagtccccctcacccgaaattcgcgctgcgtgcaaatttcgacctctccccgcaagcggggcgaggtgaacaggtcgcggcagcccgtaaacaattgcacagctagcgatccttcatggtcggatcgagcacgacacgcaaggattcgcccagcgcgttgaacgccagtgagacgacgagaatggcaaggcccggcgcatacatctgctcaggcgcaatttccatatattgataggcacgcgccagcatggcgccccagctcggatccggcggctggatgcctaggccgagaaacgacagactggcctccgcgagcagcgcggcagccagcagcaatgtcacctgcacgatgaccggctgcaaggtgttcggcagcacgtggcgccacaggatgtgccaggtcggcgcgccgaagcctctggacgcatcgacatagagctcttgccgcacaatcagcgtgcgggcgcggacgatgcgcgccagtgccggaaacatcgtgatgccgatcgcgatcatgccgttggtgagcccgatgccgagcgcgccggtgaccgcgatcgccagcacgatggccgggaatgacaggaaggtgtcgatgatgcggctgacgacgtcgtcgatccagccaccaaaatagccggcgatcaggccgaccggcagcccgatcaggaccgcaacgccgaccgcgagcaggctggcgtagacggtcgccggcgcgccgtagatcaggcgcgagaacacatcgcggccgagatcgtcggtcccaagcagatgcagttgtcccggcggtgccagcatgttgttgacgtcctgcgcggtcggcgcatagggcgcaatccaaggcgcgccgatcgcgacgatgacgagcaccgatagcaccaggatcgacagcgcggctctgagatcgccggcgagccagcgcagcaaacgccgcagccgggacggcttggccggtgctttgagggatgcgagcgccgtgtcggtcattgctcgatcctcggatcgaccgcggcgcacaagaggtcggtaatcagattgaccgcgattaccaccaccaccatggtgaagacgacgccctgcacgatcgggaaatcgcgctgaatcgcgccgcgcacgatcaggctgccgaggccggggatcgcgaacaccgcctcaatcacgacggtcgccgccagcatgcggttgaccagcagactgatgatcgtgagcaggttgacgccgacattcttcaaaccgtgctgccagaggatgcgggacatcgacaggcccttggcgtgcagggtgcggacatattgcgacgacagcacctcgagcaacgcgccgcgcagctggcgcgccacctccgccatgccgtaggctgcgatcgcaatccccggcagcagcgcgtgcctgatcgcatcgatcggcgagacgctgaaggatttcgcgccggtcgccggcagccagttcagcttcagcgagaactccgccaccagtatcatcgcgagccagaagccgggcacggcgacgccgagcgaggcgatcatgctgatcagcttgtcgatccagccattcggcttgatcgcggcgatcacgcccatcgggatgccggtcaacagcgccagcagcagcgcgatcacgacgatcagcagcgtgttcgggaaggcgcggccgatggaatcggcgaccttctcgccggtcagcagcgattgcgagagatcgccctgcacgacatggccgagccaggcgccatattgcaccaggaacggccggtcgaggccgtagagctgcctgatctcggtgatccgcgcatcggtggcgttgtcgcccgccagggtcacggcgatgtcgccgggcaccagcttgagcagcgcgaacaccatcagggtcgcaagcagtatcacgggcagcgcctgcaacaggcggctgccgatgaccttgaccggtgaccgtcgcgccatcgctaaagcacgatgaaattatgatggaacatcatcgtgctttagctccttttttgagcatgatcattttcggaaaaccgcttcgcacttttccggatcatgctagctttccagccagacgtcgtcgtatttcggcttgccgagcaggttgggccgatagccctgcaccttcttgttcatggcgaccagctcgaactggaacgccagcggcaccaccaaggcattctccatgaccagccgctgcacggttgagaacgccttgcgcctgacctcgatatcttcggacgcgcgcgactccttgatcgcggcctcgagctccggcgggaccggcgcgcggccggcattataataggcgtccttggtgaacatcagcgaataggtcaggctcgggtcgggccgtccggtccaggccgagagcaacccggcccccttcttctccgcaccgaagaaggccgcagacgcttccgcgaccgtgccgttgacgaacttcacgttgataccggccttgcgcaattgctcgatcaggatttcttcgcgctgcaccgaatcctgatcggtgtagccgccgatctcgatcgcggtgccctccttgaagccggcttcggcgagcagcttgcgcgccttgtccggatcgtaaggataaagttttgcgacctcggcatcataggcccagtgcgacttgggcaggttcatgtaggccggctcggcgaggccggcgagcgcggccttggcgaaggcttcgcggtcgatcgcgaagttcagcgcctggcggaccttgacgttgtcgaacggcggcttcgcccagttgaggaagatctggaacacgtagagtgtcgggccgtgcaccaccttgacgctcgaggcacgctcgatgatcgccttctgccgcggcggcagctgatagatcagatcgttctggctcgcggagaccgaacgcgcgccggtggtgagttctggaatgatcgagaattcgatgccgtcgggatacggccggttcggcttccagtatttctcgttgcgcttgaccacgatcttctcgccgtcggcccagctcacgaacgcataggcgccggcgccgaccggcttgcgggtcacgacgccgccctcggccaccttcaaggccgtcggcgacaccatcatgccggcgcgatcggagaggatgccaggcagcgcggtgtccggcgttttcagcttcagcgtcacctgctgcggcccggtgaccacgaccgcgtcgaccgagagcagatcggccttgatgttcgacttcgcatcgctccggttgcgatcgaggttgaacttgacggcctccgcatcgagcggcgtgccgtcatggaaggtgacgccggagcggatgttgagcaccagcgtattgggatcggtgaacttccagctctcggcaagccccggcttcggcttcagcgtctcgaattcccattcgaccagcgtgtcgtacatcgtgaacaggaaggcgtggtcggagccggcgccgccggtggcgggatcgaggctcgacggattggccggcgcggagatccgcaacgtgccgcccttcttcggcgcggcttgcgcgaatgcgcggccgccgagcgtggtgcccgccagcgcagccgagatcagcgccatggcctcgcgtcgggtcgtcatcgtcatggcgttgtctccggtacgttgttcgaaaaaatcgggcggtcggcgaaatggcaggccacccagtgatcgggcttcagctcgcgccattccggcacgcgctcggtgcagagcggctgcgcatgcgggcagcgggtgcggaaacgacaacccgacggcggatcgatcgggctcggcacctcgccttgcagcacgatccggctctcctgccgcatcgacgacggcagcggccgcggctcggccgagagcagcgcgatggtgtagggatgcagcggccgctcggcgacctccccggtcgggccgagctcgacgaactggccgagatacatcaccgcgacgcgctcgctgatatgcgacaccaccgcgagatcatgggtgatgaagacgtaggtcagcccgagatcgcgctgcagatcagcgaacagattgagcacgtcgccgcggatcgacatgtctagcgccgccaccacctcgtcgcagacgatcagtttcggcttcaaggtcaacgcgcgggcgatcaccacgcgctgcttctggccgccggacagctggtgcggatagcgctcgccgaactcctgcggcagcccgacgcgctccagcgcttcccgcgcctgccgctcgcgcgcggcgcggtcgccgatacgggcgagctccagcggctccagcaccgaggcgaggatggtcatgcgcgggttcagcgccgcgttcggatcctggaagatgatctggtaatcgcggcgatggtgctggaattgtccgcgcgacagcgccagcggatcgatgccgtcgtgcaggatcgagccggcgctgggcttcagcaggaacaccagcgcgcggccgatcgtggtcttgcccgaaccggactcgccgatgatgccgaaagtctcgccgcgacggacgtcgaaattgacgccgtcgaccgccttcacggtggcgcggcggtccgaggtctggaagcggacctggaggtcgcgcaccgagacgatggcgtcgcggcgctgttctgaagctgcggtcattgcgtcgcgaccttcgcggcaacctgcgcatccggcggatgcagtgcacctggcagattgagctcggcaaagcgatggcagcgcactcttctgccgccgccggcatcctgcagcttttgctcggcctcgcagcctttggccgcatgcgcgcaacgggcgcggaagcggcagccggccggcatctctgatatcgacggcacccggccccggatcgacggcagccggccgtgacgcgggctcaaatgcggcagcgagcgcaacaggcccgacgtatagggatgcagcggtcgcaccagcgcctcgtcgacggtggcatcctcgatcacctcgccggcatacatcgtgatcatccgcgtgcaggtctcggcgacgacgccgagatcgtgggtgatcagcatcagcgcggtcttcgaggtctcgctgatgtcacgcagcagttcgaggatctgcgcctgcacggtgacgtcgagcgcggtggtcggctcgtccgcgatcaagagctgcggcccgcagatcaggctggctgcgatcatcacgcgctggcgcatgccgccagagagttggtgcgggtaatcgtcgatccgccgctccggcgaggcgataccgacccggcgaagcatctccagcgtcttcgtacgcgcctcctcataggaaacatcgctatgcacgcgcagcgtctcggcgatctggtggccgacggtgaacaccgggtcgagcgcgctcatgggctcctggaagatcatcgcgatgcgcttgccgcggatggcgcgcatctgccgcgcgctgcaggacgccagatcgatgccgtcgaacaggatcttgccgtcgagcccggcgaaattgcccggcaacaggcgcaggatcgacagcccggtgatggtcttgccgcagccgctctcgccgacgatgccgatgcgctcgccgggcgcgacgtcgaagtcgattccgcgcgtcgcctgccagatgccttgcgcggtcctgaaacggatgccgagcccgcgcacggacagcagcggccgcacgccatcgcgcgcgccctccgccttgcgctgtgccggtggcgctgctcccatcagcccgccgcccgcttcttctctttcaccagctgctcctccatcagcatctcggtgccgatgatgccatcgcggctgagctcctcgagctcggcgtcggacaggccgagcatgccgccaagaatttcccggttgtgctcgccgagcgtcggcggcaccgagcggatcgcgaacggcgcgtcgccttcacggaacggcatcgatggctgcggatgccgtccgatgaaggcgcggtcgacctgctggatgaagccgcgggcgtggagctgcggatccttcaacagatcgatcggcagccgcgccacgccggatgcaacaccagcggattgcagcgcggccatcgccgcatcggcatcgcgcgcggaggtccaggccgtgatcgcagcctcgatctcggcctcgatggcacgacggcccgcggcagtcctgagcttttggtctgccgcccaatcctcgcggccgagcagtcgcgcaagtttgagccacatcgcgtcgtcggagaccgcgaccacgatccagttgtcctcgccattgcagcggaagcagccatgcggcacgaaatccggatggcggttgccgtatttcgaaggctgcttgccgtcgatcgaatgcgcgacgatccagggcgctgcgaacggcatcatgcattcgatctgggcgagatcgatgaactggccctgccccgtgagtttggcgtggatcagcgcggtcagcaccgcgacggcgccattgaggccgccgacggcgtcaccgaacgcggtatggctcatgaccggcggcccgccggcatcgccgaccacgctcggcaggcccgagccttgctcaagggtcgatccataggcccggcaatcgcgatgcacgctgccggcgccgaatgccgacatcgacatcatcacgagcttcggattgatcttgctcagcacgtcgtaaccgagcccaagcttgggcagcacctcgaccgaataattgtcgaccacgaggtcggcatcggcgagcagccgctttgcaagtgccagccccttcggccgggtcaggtcgagcgtgatgccgcgcttgttgcggttcatgatgcagtagcgcaccgacttctcgtacatctgctccagcacataggccgggcgccgatcaacgccgcgccaccagtccggatactgcgtcgcctcgatcttgatgacgtcggcgccgagatcggcgagcgtgcgggtacagatcggtccggcccagcccatcgagaaatcgacgacgcggatgccttcgagcggcaaccgaatggtcggagccggcttcggcgtgggcaggcgcggcgcggcctcgagcctcgcctgctgctcgccgatatcgggcacgcggccaccgcgccgcggcggcgttgccgtcagccgctgcatcgtgccggcgctgaaaccagcctcgttgccgaccgcgatcggcacgatggcgccgcgggcgcgcttctcctcgtcggcgatgaggtccgatatctccggcaccggcacgatcgggatcttgcgcttgagaccctcggtgaaccattcctgcgcggtgcgctgcttcagcttcggcaggatcttgccttcgatctcggcgacgcgttgcaaccggtcgacgcccatgaccagcgtcggatcgtcgcgcaattcattcagcccgagcatttcgcagaacgcgcgccactgcgccggggtcaccgtggtgacgccgagccagccttgcctcgtctcgtagatgccgaccggaaaagtcggccagaaccggttgaccccgatccgccgcatgatgtcgccgcgctggaacgcctcgaacatgatgtattcggtgaccgcgatagaggcttcgaacaggctgagatggctttcgcgcccgcgcccgtcctgcatgcggccgagcaccgatgcggctgccgcgatgaagccccacagcccgcccaggatgccgacctggaagtccggcgcgtgcatcggcggcccctgctcgggtccgaccagcttcacgagtccggtcagcgcgcggatcgtggaatcggtcgcggcgaaatcggcatagggtccgcgatcgccgaaccaggcgaggtcgagatggatcagccccggattgtcgcgcctgatcgtatcgagatcgatgtcgggacaatcggccgcagcgacgccgcgcccgtcgagcaaaatgtcgcagcctgcgatcagctcgtgcaggcgcgatgcatcgcgctgcgcgaggacgacgctcgatttgttgaagttgagaaacgcgaaccacgcgctgtgcccttgcggcgtcagcggcgcggtgcggcgaagcggatcgcccgcctgcggttcgaccttctgcacatcggcgccgaaatccgcgaacagccgcgcgcaatagctcgtcgccgccgcgcttccgatctcgacaatccgcagatgcgacaacgcgcccatcacgcttcctcgcgacaaaatgaccagccgatgacatcggctgattcagtttcttgttgcttgaacttgaagccgcgccgactgtgtgatgcaagtggaattttcttccgcttgacggaattcgctggattgccgcagcactttgcagcaagcgtgcgttgacggtctgccgccgtgcggttgacgcattgctcgatccgctattgtgctcccttcaaccatcaacaagcgcggggcaggaaaccatgagcaaatcaaccaccatcaaaagcgtcgaaacgctcgcctgcgatgccggctggcggaattatcatttcgtcaaggtgacgacctcggatgggctggtcggctggagcgagtatgacgaaggttttggcgcgcccggcgtgaccgccgcgatcgaacggctgtcggcgcgggtggtcggcaagaacgcgttcgagcacgagcggatttatgtcgagctgttcgccgcgacccgtcccgctgccggcggcgtggtggcgctggcgttaggggccatcgagaacgcgctgctcgacgtcaaggccaaggcgctcggcgtgccctgctacgatctgctcggcggcaagatccgcgaccgcgtgcgggtctactggtcgcattgcgcgacctggcgcatcaatcaccccgactggtacaagccggccatcaccgatctcgacggcgtcaaggcgatcggcgccgaggtgcgcgagaagaaattcacggcgatgaagaccaacatcttcgtctacaccgacggcaagcccgcgggctggcgtcccggcttcggcgtgccgttccagcccgagatcaatgtcgaccgcaatgtgctgcgcaatctatgcatgcatctggaggcgatccgcgacggcgcggggccggatgtcgaccttttgctcgacctcaacttcaacgccaagaccgagggctatctgaatatcctgcgcgccatcgagaagatggacatgttctgggtcgagatcgacaccttcaacccgcaggcgctcggctacatccgccgccagagcccgcacccgatctcgtcctgcgagacgctgctgggcttgcgcgaattcctcccctatttcgccgagcaggcgatggacgtcgcgatcatcgacacgccgtggaacggggtctggcaatcaatgaagatcgtcgccgccgccgagcatttcgaggtcaacgtcgcgccgcataatttctacggccatctctgcaccatgatgaacgcgcatttctgcgcggcagtgccgaatttgcggatcatggagaccgacatcgatcgcctcgcctgggaccacgagctgttcacccatgtgcccgaattcgtcgacggccatctggtgatcccggaccgcccgggctggggcaccgagccgaacgaggacggcctgcgcgcgcatccgccgaagaacaagggcgggctgttgaactacgggctgaagaagtagaaatcgttgcgccgatcctctccacgtcgtcgtcccggcgaaggccgggacccataaccacgaatgggagtgagccggtgcgctggagccacagcccgctataacaacaggcttcggtggtaatgggtcccggccttcgccgggacgacgcttcctcaactaccgcgcccccctcaattatcctccctgacagctgtgaacgcgctttcgatcacgtcgccgatcggctgccaggcgttgccgtcgaactgcaccagccgcatctgcttgatcggacggaaatccttcggcccggtgttgatcacgatcccaggcagcgcgatcgggctctgaaagttcttcagcgacgccgcctgccgcatgatgttgtcgcgcgacaggtcgtcgccgcactgccgcagcacctgcatcagcgtgtcggcggcggcatagccgaacacggcgtagatgtcgtccttgtcgccgtcgggatagtacctgtccatgaaggcgtcccacgccttgatctgcggatcgttcttccaggcggcgtcgccggcgtccttcaggaacgaggtcgagatcacgccgagcgaattctgcaggccggcgggccgcagcgcgctggcgatcgaggccgatgcattgtcgaggatgaacaccggatgccagtcgaggtcggcggcgacgcggatcgcgcgcgccgcgatcgccggggcgccgtcgaacaccaggatgtcggcgccggaacctttcaggattccgacctggttctggatcgcggtctccgatgcgtcgaaggcgaggtcggcgacgatcatgcccgcggtgtcgccgagcccttcctgcaatcctctgaacaggtcacggccgaactggtcgttctgccacagcaccgctatcttgcgcgagggataggcggcctggatgtaattggcatagatccgtccctcggcgcggaaggtcggctgccagcccatggtccagggaaagctcgtgggatgcgcccactcctcgtcgccggaggcgacgaacagctgcgggaccttcctctcgttgagatattttcggaccgcgaggttgctcggcgtcccgaacgagccgaacatcaacagcacgtcctgatgctccacgagatcgcgggtctgctccatcgcggtcttcggattggagctgtcatcgaccgagacgaacctgaccttgcggccgttgatgccgccatgctcgttgaccatgtcgaaataggcggcttccgcccgcccgatggtggcgaacgcggcgagcggcccggtgtagggcatgacattgccgatgcggatttcgctgccggccgcctcgggcgctgcctgcgcctgctgcgcgcgcatcggcaccgccgcaagaacggctgcgaagaccagcgatatcgaaagcgcagtttgtctttttgtttgcatcaacatcgccacaacgccggcgcagaccggcgctccctcccagcgagcggactttatcgcccaagccaaggccggaaaaatgaaatgttgatggcagaggtggacctcagcgcaatgttatgtccagccaacccagcgcattgaccgtgacgcggtcgccatcagcgaccagaaccgtggtggtttcggcctcgataatggcaggaccggccagcgaatggcccggtttgaggccatcgagcgcatagaccggcacttcacgccagccaccgagccaggcctgccgcttgccgcggggcgtgcaggccgcagccgagccggcctttccggcatcgctgccgcgtggcgcgaccttgccgaccgcggcgacgcgggcgttgacgaacaccacctcctgcccgcgcgaggcgtaggtgtagagctcctcatggcggcgatggaagcgctcctcgatctgcgccacgaggtcagcggcgccgagatcgagatcgccgagcggcacgtcgatctcgaacacctgctcgccataacgcatctcggcggagcgctcgattgcgatgtcgcccttgaaccagtcgcgcagccgccccgcggcctgcgcttccagcgcggcaaacaaggcgcgcacctcgtcggcggaaatccgccccgtaccgtaatgcgtgcggctgacctcgtagcgcagatcgctggtcagcatgccccaggccgacagcacggaggccaccgtcggcacgatgatgcgcttgatctcgagctcgcgcgcgacctcggcggcgtgcatgccggccgcgccgccgaagctgagcagcgcgaatttgcggggatcgacgccgcggcgcaaggtcatcaggcggatgccgtcggccatcttcaggttgatcatcttgtagatgccggcggccgcctcgatccgcgacagctcgagcgccgccgcaatgcggtcaaccgcggcttccgacgcggcgcgatcgagcggccgcgcgccgcccatgaaggccgccgcatcgagatagccgagcacgacattcgcgtcggtgacggtggcagccgttccgccgttgccgtagcaggcgggacccggcaccgagcccgcgctctccggcccgacccgcagcgtgcggctgccgtcgacgctggcgatcgagccgccgcccgccgcgatactggcgatgtcgaggctgcgcagcgcgatgcgctggccggcgagcatgccgtcggccgacagggaggcctggccgtcagcgatcaaggaaatatcggtcgaggtgccgcccatgtcgaacggcacgagatcgggaatcccaagcatctcggcgcagcggcggctgccggagatgccgccggccgggcccgacagcacggtgccggcagcgagccgcgaggcttcctccaccggcgccatgccgccgtgcgacagcacgacgaacagcgagcccttgaagccggcttcatgcaggctgcgctccagattggtcagatagcgccgcaccgtcggctcgacataggcgttcacgatcgtggtcgagacgcgctcatattccttgatctgcggcagcacgtcgctggagcgcgacacgctgacatcaggcagttccttcgccagccgctcgaccgcggcaagctcatgcaccgggttgagataggcgtgcaggaagcagaccgcgaccgaattcgcgccggagcgcttgacctcggcgatgacatcgccgagcgcggcggcatcgagcgcaacagcggcgctgccgtcggccttcagccgctcgcgcacgccgaagcggcgctcgcgcggcaccagcggctcgggcggcggcgtgcgcagatcgtagcgatccggcttcaggccttcgcgcatctcgacgacgtcgcgatgcccctcggtggtgagcagcgcgaccttggcgcccttgcgttccagcaacgcgttggtcgcaaccgtcgtgccgtgcaccaggcgatcggtggcggccagcatcgccgcgcgcgtgacgccgagacgccgcgccagctcttccaatccggccatcacgccgaccgactgatcggccggcgtggacggcgatttcgcgaacacggttcgcccgctttgatcagtcgcaaccaggtcggtgtaggtgccgccgacgtcaacgccaatcgtatacatcgctgccctataccgccttcgaaaccagaccttgcgcgacgtcgcgcgcgcgcgcctcagccgagcgcttctcaggcggcccccagccgccgccgcccgacgagcggatctcgaggcaatcaccggggcgcagctctatgccgacctccttggtcttcagcacgcgcggcgcgcggccttccgacaggaggcgatagtgatgcggctcgccatccttgccgccgagcatgccgcacgggccgtggcgcgcgccgtcgccggcggtgttgcccttggccggcctctcggtctccagcaccatgtcgagcgccacaccgaggccgccgcgatgctggccatcgccgccggaatccggccggaactcgtgctggcggaaatgcagcggaaagcgcacttcggcgacctcgatgctgccgaatttgagcccgcccaccgaatgccactcgccgatcgaggaatagccgtcgccgccgggcgacgcgccgccgccgggccgcgcctggaacatgtgccagatgaaattgcgtccgttgcgcggatcctcgccctggatcgcgatgcggaatcttcgcccccagccacccatcacgcgatccggacaggacgccgacatcgccttgatgatcgcctccacgatttcgttggagggatggctggtgcacaaggtcaccggacggccgggatcggcccacacgatggtgccctgcttcgccaccactttcagcggccgcagcgcgcctgtgttcttgggaatatcggcgtcgatcagataggcaaacgccatcgccaccgcagcctgcatgttggcgtgcgacgaattgacaaaactagtcgactgcggatcggagccggtgagatcgacctcaatgtcgctgcccttcttggtcaccttggcggcgatcttgatgtcggtgcggccgtggccgtcatcgtcgagcagcgcctcgccgtagaacacaccatccctccaggtcgacaccacggcgcgggtctgctgctccgtcgcatcgagaatggcttcgatcgcggcttcgaccgtctcggcgccgaattcgctgaacagctttgcgacccgccgctcgccgagatgcgccgcgccgagcatcgccgcgaggtcgccgcggaattcgcgggggttgcggatgttcaaagccagcaggtcgagcaggtcctcgcgcggcttgccggcctcatagagcttgatcggcggaatccggatgccttcctgatagatctcggtcgccgccggattgtaagcgccatgggtggcgccgccgatgtcgctctgatgcgcccgcacgatggtccatagcagcctttttccgccatcgaataccggcacgaaggcggtgagatcgggcagatggctgccgccctgatagggatcgttgagcaggatgacgtcgcccggcgcgacatccttgaagcgctcttcgaccgcgagcgtcgcccacggcagcgcgccgacatgcaccggaatgtgatcggcctgcgcgatcaaccgcccgctggtatcgcagatcgccagcgagaaatcgcggctggaattgaggatctgcgaataggaggtgcgaagcatggcttcgcccatctccttgacgatcgacgacaggcggtgctggacgacggaacgagtgatcggatcgatcttggcaggcgtggacacgtgacttccggaagcagtggaacagaccgctatcttatcgtcaccgccgtcgaggtatagacccaaaacagcacgaccccgatcaccagcgcggcggcgatgaacagcagcacggcaggcagcccgaacagcgccgcaacgccggcggtgctcgattgcaacagcgctgcgccgaggaagaacgcgagattgaccgacgacagcgccttgccggtgttctgggcgtccacgagctgccgcgtcatgccatagatcagcggctgcgccgacgtcgccagcccgatcaggatcagcagcaccaggtcatattgcgtcggcatcacggcaacgccgaacagattcgagaccgggaaatgcggcgcgccggcggccatcgctaccaacagcaatgcggcgatggcatgcgttgccgccaccatggtgcggcggtgcccgaacttgcgatcgaaggcgccgatgcaggccgggccgacgatcatcgccagcgtgaacaggccgagcacgttgccggcctcgatccggctcaagcccttcacatccatcagccacggcccgccccacaggccgcgcagcaccagcgacgcgccgagcgagaccagcgacagcgcgatcagcccgcgcaggccgcgcgacaggccgagccgcagcacctcggccatctgatgcagcggcgaggaatcatccgcatgcaccgccggctgccgcggcaccagcgcaaacaccgcgatcagcaccgcaattccgaatccagccgaaacccagaagccggcccgccagccgaactgatcgacgacgaaggcgagcgggctcgccgacagcagcatgccgatattgccgatcgagaggatcaggccggaccacaagccgaacttcgccgccgacatctgcttggcggcgagcgtcatcgggcacatcagcatgccggaggtggcgatgccgagcatcaattgtccgagcacgaagctcgcggggccggtggccagcgccgagaccagcgtcccgaccacggtaccgccgagcaggctcagcgacaccggccgcacgccaaagcggtccatcgcggcgcccaccgggatttgcgaagcggcaaaggagaaatgatagatcgaggtaaggctcgccagcgcctgcggtgaggtaccgaaatcccgcgccatcaggtcgaggctgatcgccgggatcgtccgcagcagcgtcgacagcatgtgggccgaggccaatgccaggagcgcaagaaccagggcgcggaacccgatccccgcctcctccttcgtcaccacgccgtccatgaatcgcccatttcccaagcagccttggggagggcgtaacattattgggctgatgctgccaactttataggcatgcggatcgggctgagctttcttgcctctcccgcttgcgggggaggccggatcgcatcgggggctctcgccacacgaagagtgtcgcgagcggcgaaaccctcaccccaaccctccacgacgcaactcgtggagagagcccccacccggaccctcccccccgcaagcgggagagggagcgcaccgaatttgcggctaacctgatcgcgactactgcttatgaaacaccagcgtgcggagctcgatgctttcgcgcggcgcggcgtccgccggcgtggtcggatcgacgaacgcggtgtgcggcccgaaccgggtgcggccgtcggtcgccgaatcatagcatttcagcaggatcgcctcgtccggcgtcatctcgggaatgtagaaccagcggtggttcggattgtacttcaccgaataggtctccccgctgcggttcgggtagatcaggtcggaggcgatcagatcctccggcgcgacggtggtgccgtcggccatcgccagcggtgaatcacgcagcggaccgcggatcgggcgccacagattgatcacctggacgcgacctttgacgagctgctcggcttcgtccggcagatgctcgaacacgcggttgaggcccgacacggcggtctggtcgacatggacgcgggttgcgggctggcgcggtccgccgccgcggatgtcagccgccccctcgacgcgcttgcgcacggtgtgatcgaagatgaagacacggtccgcgttcaacgtcgccttcaggaaggcttcgacggcggggtagtagacgttgcggacttcgttgtcgtcgtaatagtccttcacgctggtcggatgcttgaccagcgcaaaaccttcgcgatcgagcgagaagctgtcggcgatcaggcgcccgtcgaagatcgggacattgtggggttcgggcagcgcggtggatttgggttcgccgggcggcggatcgaaagcgtaagtccggggcttgcccggcgtcggcgcgaggtaattcagttcagcggtcacaaacggcagcgactcgatgcgagtttcttgaaggcccacggtgatctcccggactcgattgttggtgcttttgatcttggcggcggcggccggggtgacaagggcgcggcgaaaatagcaacgttgctgttccggaatgtacgacgtgaggaaaatccttgccgtgcggctggcgcgggacgaatggatattttggtgatcacggattcgttagcgtgatgagtgtcagcgcatcctctccacgcccgtcgtcctggcgaaagccaggacccataaccaccgaatttgatgatgagcgggatagcggcaccagcctcgtccaaaacagacgattggggtaatgggtcctggctttcgccaggacgacgctgatggtgatttgcagcgcctgccgcctatgctgtcgcgctctacagccccgcacccttctccaccgccgcagcaaacgagcgatcgacaatatcggcggcgttgatcttctgccggatcaggccccagcggtcgtagaggtcgatggtcttctgctcgtcggcgaccacgccgtcgtcgatcggcgcgatgcggatcttggcgcgcgccagccagttcaccgcaactgcgggcgggatgttcatcagccggccccaagtcgcagcatagccctcgacattgtgctgcgaccaggcgcgcgcggtggcgaggcggcgcacgaaatcctcgagctcggcgcgcttggccttgatcgcgtccggggttgcgacctggaagccgaggccgggcgtgatgccgtcggccgtgatgacgcggcgcgacttgaacagcacctcttcctgactcacatacggctcccaggtcgaccaggcatcgaccgagccttgcgagtaggcgaccttggcgtccgacggcgcgaggaacacgatctgcacgtcgctcgcctgccagcccttcgattccagcgccgccaggatcagctgatggccgatcgagccgcggccggtcgcgatcttcttgccgcgcagatcgtcgaagctcttgatcgcggaattttccggcaccacgatcgcaagcccgtcgcgcgactggcgtaccgccgcgatcgccttaaccggaattttggcagcagccgcgaacgtgaacggcgcatcgccgaccaggccggtgtcgatcgcgcccgcacccaaggcctccagcagcggcgccgccgcggcgaactccttccactcgatcttgtagggaacgtccttcaagacgccggccgcttccatcacggcctgcgaattgcccttctggtcgccgacacgcaggatggtctgcgcggcggcgacatcgatggcggcgaacacaagcgccgccgcgacgatgaagcggatcattcggcggcgatcccgcgctgctggtcgcgtgcgtcgatcagcttgcgggtcaacgggatcagcgcgcggccgtagtcgatggcgtcgaccagcggatcgaagccgcggatcaggaagtggctgacgccgagatcatagtaatcaccgaacacttcggcgacctgctcgggcgtgccgaccagcgctgtcgtgttgctgttggcgccggtgagctttgcgatctcggtccacagccgcttgtcgatgcgctggccctgatcggccagcgccagcagccgcttggcgccgtcggtcgcgtggttgggacggcggtagccggtctggtcctgcagcgcggtggcgcgctcgaggatgtgttcggccttcttccacgccttctcctcggtgtcggccaggatcggccgcaccgacaggctgaagcgcggcgtcggccggccatgcttggccgcggccgcgcgcacccgcgcggtgacgtcgcgcacctgggcgtaggattcgccccacagcgcgaacgtatcggcgtgcttgccggcgacctcgaccgcggcatccgaaccgccgccgacgaaggtgtagatgccgcccttctgcaacggcttcacctgcgagaagccgttctcgacattgtaatacttgccgctgtagctgaacggcttctcgctggtccattccagccggaccacgtcgaggaattcgctggtgcgggcgtagcgctcgtccttgtcgtcgagcgtgttgccgtcctggcgcagctcgatcgcgttgccgccggtgatgacatgcagcgaaaccctgccgccgtagaactggtccagcgtcgcgagctggcgcgccaacagcgtcggcgcagtgaagcccggacgctgcgcgatcatcaccttcagctgcttggtgatggtgagcacatgctgcgcgacctgcaaggcatcgggagtcgtcgaatggaacgccagcagcgcgcgatcgaagccggccagctcatgggccttggcgaccgtctcgatatagggcggatcgagcaccggacctgaccgcacgatggtctcggacgcattgttgttggtgatgaagccgatgaactcgaccggcatggctgataactccgttgttgttggccgttgtttcagacgcccagcgcaaagcgtccggcggcgacgcgggtggaatcatcctgcggagtatggacgcggccgcacaatacatcgcgataatgccgctccagcggattggttcgcgacaggccgtgattgctggtcagcgacaaggcatcctccaccactgctgcggcgttattggtcaccgtcagcttgatgatgttagactcgatcgcggacagcggaaagccattatcgaaatcggaagcaaagctgtcgatcagccgcgcattcaccgcaagccgcgcctcgatgccgccggccacctcctgcatccgtggcagcgtcgccagcggcgcgccgagattggcgggcacccgctccttgaggaatttgaccagccagtcgcgggcggcgcgggcgataccgtcatagatcgcggcaacgaagatcgcatgcacggtcgcctgggtaacgtccggaaccttccaatcgtcgggcttgcggacgtcgatctcgtagtccaacgggaacacgacgtcgtcgaagaccacggtgtggctgccgctggcgcgcaggccgagatgatcccaggtttcctcgatccgtgttcccggcaatccggccggaaccagaaactggccgacacgggtgtcctgttcgtcggttttcgcccagaccgcgtaccatttcaggatcggggctccggtcgaatagatcttgcggccggtcagccgccagccggtttcggtgcggcgcgcaatggtcgccggcaggccgccgcgcgcgggcgagccgagctcgggctcgacccgcagcgcgttgatcagcgccacgccctccaccgtctccttcgcaagcttgcgcgacagccgggcaggccaacgcgtgctgcgcgccatcaccagatgctggatgtaatgcatcgacagcaccagcgcggtcgacggatcggccttgccgatgatgccgagcacgcgcgtggcatcgcgcgcgcccgccccgctcccgccaagcgccgctggcacggtcagcgccagcaggccttcgcgcgacagatcggcgaaattctcgaatggaaagctggcgtcacggtcatgtgcggcggcacggccggcaaacacatcggcgagccgcaacgcacgcgcaatgtgttccggctcattcgcctgcggcagctccctcgccgccgtcgtcaccacgtcgcctccagcccgagcagcccgaggatctgcttgcgcaggtccgcgagatagggatcgccgcgatgccgcggatacggcctggcgaccgcgatgtcggccttgatccgcgccggccggtcggagagcacgatgacgcggttggcgagcaccagcgcctcctcgacgtcatgggtgaccagcagcgtggtaaaccccttgcgctgccacaacgccacgagctcggactgcatcgcgatccgcgtcagcgagtcgagcttgccgagcggctcgtcgagcaccaggatcttcggatcgttgaccagcgcgcgcgccagcgccacgcgctgtgccatgccgccggaaagctggtgtggataggcgttgcggaacgaggacaggccgaccagctcgatgacctcatcgacgcggtgccgttgcgccttcaggatgccctgcgcctccagcccgagcgccacattgtcccagaccgtgcgccacggaaacagcgtcggatcctggaacacgacgacacgcgacggatgcgggcccgtgatgcgcgcatcatcctcccgcagcgagccggcgcgcggcttctcgagccccgcgaccagccgcagcaaagtcgacttgccgcaaccggacgggccgagcagcgcgacgaactcgccgggtgcgatcgaaaggctgacattgtcgagcaccggcagggtcgcgccgtcgatatcgaaggcgtggctgacgccctcgatgtcgagctcggcgccgacggcgggataggtgatcgcctcggcggcggactgcactaccatttgacgacgcccttctgccagaccagcaggcggtcgcgggtcttgaacagcagcgtgatcgcgccggagcagagcagcgacatcacgatcagcgccgcatacatgttggaatacgccgcccagccctgcgcccattgcagataccagccgagccccgccttgacgccgatcatctcggcgacgacgagaaccgcaaaggacgagccgagccccatgaacaggccgacgaacacatgcggcagcgcggcggggatcgcgaccttgagcaccaggaatgacggcttggcgccgagcgtgcgcgcgacgtcgtaataggcgctgctgacgctggcgacacctgaccaggtcaagaccgtcaccgggaagccggtggcaagcgcgatcaggaaggtcgaggcgctccagctcgacgggaaggtgaagaaggcgatcggcagccaggccgtggccggcagcggaccgatgaagcgcagcaccggatgcacccagtagccgatcttctgcgaccagccgatcgagacgccggtgacgaagccgacggttgcgccgatgatgtagccgccgagctgcagcttgaccgaggcgaacacgctgtcgagcagctttggcaggtcgtcggtatagacttcaaggatcgcctgcggcggcgggaagaacggcagcggcagccaggcgaatttcgcggtcgcgacctcccataacgtgacgaaggcgccgaaagccagcagccacggcgcacgcttgcgcagcgcctgcccggcgctgccgagataatccgcgctgaacgtgccgaacaggataaaggccgcgatgacgatggcgccgatgccgagcgatccggtccgcgaccagtcaccgacatcgggccaatagaggcatgagagaccgaacgccgcccatgcaaggctagccgcaagcccgacaccgtagctgccggagatatccgcgaatgtgaccgcagcgcgcggcgcggccgcggcggtcgcgtcagacactgaatacgtcgacatagatccgctccgcgaatttggccgtatccgtgctctgcttgaacacctgcaccgatttcagatcgtcggcgtagcccttcagctcgcgcttcagcacctcgccggtcggatgatggtgatgggtgtggtaacgcgccatcgcttcgagatcggcgaggctcgccgccttcggcgcgtagggctggaacgatttcgccgccttgtccgggttctgcgaggtgaacatcgcggcatcgagcagcgcctgcgttatggcacgcgcgacgtgcggctcctcgcggaccaggctgccgcgcaggccgacgatgcagcagctcttgtcgcggtattcgccgtcgagattggaggcaacctccttgtattgcgtatccttcagccagagataggccagcgggtcggacgacaggaacgcctgcacctcgcccttctcgaccgcgacgttcaagagattgcccggataggcgcgccagtcgacgtccttgaccggatcgatgccgagcttggagagctggatcgagaagaagttcttgtcggggccggcgaggtcgccgaccgcgacgatcttgcccttgaggtcggcgagcttgccgatgccggaactggtgcgggtcaacacccgcatgcagccgccatgggtgccggcggcgatcttgacgtcaaacccctgttcgagcggcttcagccagcgcagcgccatgccgagcccggcatcgctcttgccggtggcgatcgcctccagcaactggtcggtcgagccggaataattgacgagctcgacatcgaggttctgcttctggaagaagccgtggtcgatcgcaaccggaagcggcgcgaggcagaccgcaccggcgttccacgacagtttcagcttgcgcggcgcacctgacagcggcggcgtatcggacgcggtcttgcagatcgggaattcggagaagtcgatcgccggcgtgatcgggcgcggcgcgaaggcctgcgcgctataggcgccgatcggcgcggcaaaggctgctgcggcgcccgcacgcagcaatgtgcggcgatccatcaccgtcttcttgttggtcgacattttcactcctgcatttcggcaaggctccgccccacgcgcaaatcgtcatgacctgcacgccccgtcgttcgaagctcaaggttcagaaaaagcggatttctccggcgctattgcactcaaagcaaccctcaaatgatgcggcgcgacaagttcaccgtcaatgaaatggaatttcgaatgtggtcggtgcggcagccgatctctccacgatcgcatcgcgcgacgatgaaaggattttcgctgtcggcacggcgcagagacgcggcgcggacactgcgattgcatcaaatttgagcggctagcgaccgcacgcacgatgtcttctacgcgcgacctgctcgacgagatcatccttgtcgtagcgtccgcgaattcagatttccgtttcgttgacggcgagcggcttgctcatagacttggtcgaacgctgccgcgcctttcgccgagcaacgactgaatcagaaagaaaaaccgacatgcacaaactcgcccgctcgggctctcgccattccctcactcgccgcaccgcggccgcgctgatcacggcggtgatcacgctgtcaacatcggcggcggcgttcgcggccgacgcgatcgtgctgcgggtcggcgaccagaagggaggcaaccgctcgctgctcgagatctccggcctcgccaaggacctgccctacaagatcgagtggtcggaattcccggccgctgccccgatcctggaagcgatcaatgccggcgcgctggaagtcggctataccggcgatctgtccttccttacggtctatgcctcgggcgcgccgatcaaggcgatcggcggcacccggtccgacgcgcggacgcaggcgatcctggtgcgcggggattcgccgatcaagtcggcggccgacctgaagggcaagcgccttgccggcacgcgcggcggctggggccagttcctgatcaacgcgacgctggagaaggccggcagccggatcgaggatgcgaccttcgccccgctcggcccggtcgatgccaagatcgcgctgctcgccggctcgatcgacgcctgggcggtgtgggagccctacatctcctacgcgacattgaaggacaaggcgcgggtcgtcgccgacggcgagggcctgacgccgaccatcaccttcatcgtcgcatccgacaacgcgatcgcgaccaagcgcgccgcggtgcaggaccttgtgcagcggctcaacaaggcgcggctgtggtcactcgaccatctcgcggaatacgctgggagcacggccgagctcaccaagctgccggaagacgtgctgctcgccgcctacaccgcgcagaagacctcgccgatcgcgatcgacgaggccgtggtgaaggaggtacaggccgcatctgaccgcgccacgcgctatggcatcctcggcaagacgctcgatgtcagcaaggccgtcgatcgcagctttacggctggcgcgagctcgaactaggccgcgcgcacacctccccttgaaaaggacgcgtatgacgttggtgtccgtagactccgttccgcctctcccgcttgcgggggaggccgacgcgcgctcagcgcgcggtgggtgggggctctctccacgatatgcctcgggaagagacccgcaccccaaccctcccccgcaagcgggagagggagccgagcgacgtgctcacctgacgaggtgactcaccccgcataaccatggagacccccgatgtccggcccgctccatctcgccctgatcgtcacggcacacctgctctgcatgaccttgttggtcgcgctgtcggtttgatagcgtcgctccgggaccttgatccatcggagaaaacaacaatgaacctatcgatgaaagaccgcgtcgcggtggtcaccggcggcagcaagggcatcgggatcgcggtggcgcggcggtttgcggagtccggcgccaaggtcgcgatcctcgcccgcggcgcagccgatctcgcggcggcgcgcgaggcgctcgccaaggacgggctcgtggtgcgggattacgtctgcgacgtcgccaaggccgccgacatcagcaaggcccatgacaagatcgtcgccgatctcggcgggatcgacgtgctggtcaacaacgccggcaccgcgcgcacgctggcgttcgagagcatcagcgacgaggcctggcaggaggacctcgacctcaaactgttcgccgcgatccgcttcagccggctggtctggccgggcatgaagcagcgcaaatggggccgcatcatcaacgtgctcaacactttcgccaaggcgccggccggcaattcggcgccgacctcggtgtcgcgcgcggccggcatggcgctgaccaaggtcatggccaatgagggcggcgagcacaacatcctggtgaatgcgttgctggtcggcctgatcatgagcgatcaatgggtcaagcggcatgctgcccaggcgccgaacacggatttcgaggaattcgccaagggccttgccagggggacgccgctcggccgcatcggcacggcggaggaattcgccaacctcgcctgcttcctggcctcggaacagggatcctacatcaccggcaccgccatcaatgtcgacggtggccgctcgccggtggtctagcacttcggcttcgatccagtcgaagccgaagtgccagggtcttgctttggcaggcagcaacctacggcaggaagcgacggctcaaaagcaaaaggcctccgtcaccggaggccttctattcttaaaccgcgtccttggcggccttgaccggccgtgcgcggacgatcttccgggccggcttggccttgaacatcatctcttcgccggtgaaggggttggtgcccttgcgcgccttggtcgcaggcttcttgacgacaacgaacttcgcgaagccggggacgaggaacaccccggccttcttcagctccttgtggccgacatcgacgagcgagtccaaaacgttcttgacgtcgcgcttggagagttcggtggtggtcgcgatcttctcgatcacttgcgacttcgacagttgggtagccatggttgctccattgattctggagtgggcacgatatggcggaaaacgccgagaaaaacagtgttttctgcactcaccccagcaatatcgctgtggacagcccccgaatcagtgatttttccagtgttttttccagtcaaggcacttccgacccctaaaattatagcgtttgcgcggcttcggggctcccgaagcggccgctcgagagaatcacccgaacacatctcgcgccgccggcctgcgacgacgcggcgcgcaatccgggttgcgacgcgccgcaatgcgccacttcaggtttcggaaacgatcctccaaaaggccgagccattagaaaacgacttgggttcgactcgggttcccattccaaggtaacatcacagaggggcgccacgccgatcggccggccgcccgatgcaagcctttatgtaagttctggagacccgcgtatggatttgagccgcctcgagatcaaccgccgcacggccctgctgacctcggccgcgattgcggcaaatgtcatcaatccgatgcgggccttcgcgcaggagaccccgcgcaagggcggcgtgttcaacgtccactacggcgccgagcagcgccagctcaatccgagcatccaggcctccaccggggtctacatcatcggcggcaagatccaggagaacctggtcgacctcgatgcccagggacagccggtcggcgtgctggccgagagctgggaggcgacgccggacggcaagaccgtcaccttcaagctgcgcaagggcatcacatggcacgatggcaagccgttcacctcggaggacgtcgccttcaccgcgatgaacatgtggaagaagatcctcaactacggatcgacgctgcagctgttcctcacctcggtcgatacgcccgatccgcagaccgcgatcttccgctacgagcggccgatgccgctgaacctgctgctccgcgccctgcccgacctcggctatgtctccgcaaaacatctctatgagagcggcgatatccgccagaacccgaccaatctggcgccggtcggcaccggcccgttcaaattcgtcaaatatgagcgcgggcaatacatcatcgccgaccgcaacccggattactggcggccgaacgcgccttatctcgaccgcatcgtctggaaggtgatcaccgaccgcgccgccgcggccgcgcagatggaggccggcgagctgcattacagcccgttctccgggctgacgatctcggacatggcccggctcggcaaggacaagcgcttcatcgtccagaccaagggcaatgagggcaacgcccgcaccaacaccatcgagttcaacttccgccgcaaggaattgtccgacatccgcgttcgccgcgccatcgcgcatgcgatcaacgtgccgttcttcatcgagaatttcctgggcgatttcgccaagctcggcaccggcccgatcccctcgacctcgaccgacttctatcccgggccgaacacgccgcaatatccctatgacaaggccaaggcgatcgcgctgctcgatgaggccggcttcaaggccagtggcggcaaccgcttcgcgctgaagctcttgccggcgccgtggggcgaggacatctcgctgtggtcgaccttcatccagcagtcgctgggcgaagtcggcatccaggtcgacatcgtgcggaacgacggcggcggcttcctcaagcaggtctatgacgatcacgccttcgacctcgccaccggctggcaccagtaccgcaacgatcccgcggtctcgaccacggtgtggtaccgctccggccagcccaagggcgcgccgtggaccaaccaatggggctgggaggacaagaccgtcgatgccaccatcgacaatgccgccaccgaagtcgatccggtgaagcgcaaggcgctgtacgccgaattcgtcaaggaggtgaacaccgagctgccggtctggatgccgatcgagcagatcttcgtcaccgtgattacggccaaggcgcgcaaccactccaacaccccacgctggggctcggcgagctggcacgatctttggctgagtgcatgaggccgcttctcccgctccccgtttcttcacggggagagggttgtggtgaggggccctctccgcaatttcgatccatcgacagacctgtaccccctcacccggatcgcatctgacgatgcgatccgacctctccccgcaagcggggcgaggtgaccgagaggccagtgtccacgtcgtctgaaaccgctatagatgaagcatgcgtatcctgagccttgcggggcggcggctcgccgcctcgattccgaccttgttcctgatcctgatcggcgtgttcctgctgttgcagctcgcacccggcgacaccgtcgatgcgctgatggcgcagatgggcggcggcgatgccgcgaccgccgaggcgctgcgcaagttttacgggctcgacctctcggttccggcgcagctcggcaattatctgtggcatctggtgcggctcgatctcggattctcctcgatctacggcaagccggtggcgaccgtgatcctggaacggctgccgccgaccatcctgttgatgaccgcgtcgctgtcgtttgcgttcttcttcggcctcgtgttcggcgtgatcgcctcgcgtggcgtcaaccgctggccggatacgctgatctccacactcggcctgatcttctacgccacgccttcgttctggttcgggctgatggcgatcgtggtgttctcggtctatctgcaatggctgccgccgggcggcttcgaagacatcggcaccgtgcagaccgggatctggcgcgtgctcgacatcgccgcccacctggtgctgccgacgctgacgctcgggctgatcttccttgcgatctatctgcgcattatgcgcgcttcgatgctcgaggtcttgaacctcgatttcgtccgcaccgcccgcgccaaggggctggacgagacgcacgtcatcacccgccacgtgctgcgcaacgcgctgctgccgatggtgacgctgatcggattgcaggccggcaccatgctcggcggctctgtcgtggtggagagcgtgttctcgctgcccggcctcggccgcctcgcctatgaatcggtcgtgcagcgcgacctcaacacactgctcggcatcgtcttcgtgtccgcgctgctcgtgatatcggtgaacttcgtggtcgacctgctctacgcgcggctcgatccgcgcatcgcggcggagggctgacgatggatgcggtgaaacgctacttccgcagcccggctgcggtgatcggcctgatcctgctgctgctcatcatcgcgatggccgtcagcgccggcttcctgtatccgcgcgatccgctcgcgctggcgggccggccgctggtctggccgttctccaacccgcgattcctgctcggtaccgacaattccgggcgcgacatcgccgcccagatcttctacggcgcgcggatttcgctcctgatcggcggggtcgccaccgtgatcgcgatcgtgatcggcatcctggtcggcgccttcgcgggctattatggcggctgggtcgacaatgtcctgatgcggatcaccgaggcgttccagaccttgccgaacttcgtgctgctgctggtgctggtcgcggtgttcggctcgaccctgaccacggtgaccattgcagtcggcgtggtgtcgtggccggcgccggcgcggctgacccgcgccgagttcctgtcgctgcgcaaccgcgaattcgtccaggccggcaagacgctcggcatgaaggacctccagttgatcctcggcgagatcctgcccaacgcgctgccgccggtcatcgtctatgccagcgtggtgatggcggtcgcgatcctgctggaaagcgcgctcgctttcttaaggctgtccgatcccaacgtcgcctcctggggcaatctgatcgggctcggccgcgacgtgctgcgcgtgcagtggtacgtctcggcaatccccggcatcgcgatcctcgtcaccgtgctggcggtgtcgctggtcggccagggcctcaacgatgcgctcaatccgaggctgaagagccgatgagcgaagctgtcctttcgctcgacggcctgaccgtgcgcctgcccaggggcgccgaccggccgcatgcgctgtccgacgtctcattgtctgtcgcgtcgaacgagatcctctgcgtggtcggcgagtccggctccggcaagtcgatgatggccaacgccatcatgcggcttctgcccaacgaggtgacgatcgaacggggccggatgatgttcgagggccgagacctctgcgacccacaccgccctgtccaaggctgagatcaacgcgcgggtgctggcgctgctcgaagacgttcggatctccgatccgaaggcggctgcgaaagcctacccgcacgagctgtccggcggccaacgccagcgcgccatgatcgcgatggcgctggcgctcgacccgaaactcctgatcgcggacgagccgaccaccgcgctcgacgtcacgacccaggcgcagatcctgaaactgatccgcgatctgcagcagcgcaagaagaccgcggtgctgttcatcacccatgatttcggtgtggtcgccgagatcgccgatcgcgtcgtggtgatgcagcacggcgccatcgtcgagcaaggcgcggccgacacggtactgaacgatccgcagcatccctatacaaggcaattgattgccgccgtgccgccgctgacgacgccaccgccgcgcatcctgtccggcaagaccatcctgaccatcgacggcgtctccaagacctatcgcaccggcggcttcctcggtcgcggcgcgcggatcacggaagccgtcaagaacgtctcgctgcgcctgccgcgcggcgcgacgctcggcatcgtcggcgagtccggctcgggcaaatcgacgctggcgcgctgcatcgtgcggctgatcgaccccgatgccggctcgatcgtactcgccggcaaggactgggcgaagctcggccgcgacgagatcaggcgcgagacccgccacatccagatggtgttccaggacccgttcgcctcgctcaatccgcgccgcaaggcgaccgagctggtggcgcaggggccgatcgtgcatggcaccggacgcgccaccgcgattgcggaagcacgaaaactgttcgagctggtcgggctcgacccttccgccggcgaccgcttcccgcacgaattctccggcggccagcgacagcgcatcgggctggcacgggcattggcactcaggcccgacgtgctggtcgcggacgagccggtctcggcgctcgacgtctcggtgcaggcacaagtcttgaggttgctcgccgagctgcggcagcagctcggcctgtccatcatcttcatcacacacgatctgcgcgtcgccgcgcagatctgcgacctcatcgcggtcatgaaggatggcgccgtggtcgagcaagggatgaccgccgaggtgttcggcaggccgcagcatccctatacgcaggcgctgctttcggcgatccccggcggcgacttcacgcgcaagcgcgatgccttgatcgcctgatcgggccacgcgcttggcggcggtccttacctggagcggtgcgaggcgagcacttgctccgcccagcgcagcagctcgaagcgatcgcccctgaccggttcctgggcgtcgcggcgccggtagagcaccagcatccagggcgcgagcttgcgcaacaagccgtgcgccacatactgcaccggctcggtgaacggcagcgccagctcattgtcgggcacgccctggactgcccgcgccaattcgcggccgagcgggatggtcagcgcgacggcgcggccgttgcagccggtccagccataggcgttcggtccgagccggtgcatccgcggcaggaaatccgcggtcatcccgacatagccgttccagacatagtcgaacgagacctcgccgatctgcggccacaatcgctgcaaccgctcggtcaaccgcgccttcagccgcccggtcttgtcgccgaacccgagcacggcgccgccggtgacgaggcgattgcgggcatcgtagcgcgcgaaatacagctcgccatgggtgtccgacatcgcctgccggccggggatgatggttttgcggacgttgtccgacagcggctgcgtcgccatctgccaggacagcaccggcatcacctcggtcgcgatctcgggcaccaacgatttcgcgaactcgccgctataggcattggtcgcgaccaccagcgcacgacccgagatttcgcccttctcggtcttcaccacccagcgatcgccgcggcgctcgaaactcagcgccggcgaacgggcatagatccgtccaccgaggccgagcacggtgcgcgcaaggccgcgcgccagtgccagcggattgacgtgaccgccggtcctgttccagaaaccgccgtaccaggcatccgagccgagcatgtcgcgggtctggtcgcgcgagagcaattcgaccggcgcgccgaatttcgaccattgctgcacccgccgctccgcgatcttgatgcggccaggcgagtgcaccggctgcacccagccggcctgctcctgctcggccgcgatatcgtagcgcttgacgatttcgaacagcatggccgcgctgtcgcgcagcatcgcgacgaagcgctcaccggcggagccatgccgcttgatgatgtcatcgggatcggggcgcgacagcgtcgggatcacctgcccgttgttgcggcccgaggcgccccagcccggctcggccgcctcgacgatcgcgacgtcgacattggcctcgcgcagatgcagcgcggtcgacagcccggtgaagccgccgccgatgatgacgacatcagcctgctgcgcgccggtcaattcggggcaatcggggcctgacggcgtcacggcggcccagagcgaattgggccagcgcacggcattgctgctcatcatgatcctttcttgcgggtgcccggtcattctggttagctttactctactcactcattccagccgggaagacaagaagtggcactcaagaacgtcatcggaatcgatcacgccgtggtcatggtcaaggacctcgacaaggccgccgaaaattacaaacggctcggcttcaccgtgtcgccgcgcggcacccacagcgcgcatatgggatcgggcaactacaccatcatgttcgaccccgactacatggaattgctcggcgtgctgacgccgaccgaacacaatgccccggcgcgcgccttcctcgagaagcgtggcgaaggcatcgagcggatcgcgttcaccgcggtggattccgccgaaggcgccgaggagatccgcgcgcgcggctatccgccggttgggccgaccgatttcgagcgcccggtgaccttgccgaacggcaccatctccgcggcaaaattccgcaccttccaatggccgacggcagaagcgcccggcggcgtccgcatcttcgcctgccagcacaagacccgcgagacggtgtggattcccgaattgatgacgcacgccaatggggcaaagcgcctcaagcaggtcctcatcgtctcgcccgatcccgcgactgacgccgcgcatctctccaagatgatcgacatcgccgtcaggaacgatgccgacggtgcgattgcgatgccgtccggcggcgatcgcgccgacttcgtgttcctgaccagggatcaactcggcaagcgctatcccggcgtgtcgctggatggcctgtccgatcgcggcggcgccggcctcgtcatcgcagccgaccttgccgcgaccgagaaagcgctcggcgcgaccggcgtgaagggcggcaacggcatcaccgtgccgccggcttccgcgaacggcaccctgctcgccttcgtcaaggcatagctgcccgacgtcgcgcggcgctgcatcatgcggcgtcgccactcaagcatcgatgcgaactttgatcgcatcgatgctgtacctgcatcggttgatgctcgatccgtccggaaaaccggtgttcacttttccagatcatgctctagtatctctcccaaacaagaaccgtcccaggggagagaaacatgtcgcatcacctgatctcgcgccggcagatgctggccggcacggcagccgcaggcgcggttggattggccggatttccggcccgcgccgaggtcaactggaagaaatattccggcacctcgctcgaagtcagcctcgccaagggaccgcgcggcgacaatctgcaaaaatacatcaaggaattcaccgagctcaccggcgtcaaggtggaatcggagcaagtcccggagcaacagcagcgccagaaatgcgtgatcgagctgtcctcgggcaagccgagcttcgatgtcgttcacctcagctatcacgtgcagaagcggcaattcgagaaagccggctggctcgccgacatgtcgggcttcctcaaggatccaagcttgacgctgccggatctggtcgagagcgacttctccgcagctggcctgcaatatgcgcgcaacgacaagggccagatgctgtcgctgccgtggtcggtcgactacttcatcctctactacaacaaggatctgttccagaaaaagggcgtcgaagtcccgaagacgctggacgagatggcggtcgctgccgagaagctgaccgacccgaaggaaggcgtctacggtttcgtcggccgcggcctgcgcaacgccaacatggcgatgtggagcaacttctatttgaattatggcggcgaattcctcgatgccaagggcaacatcctgtccgacggtcccgaggctattgaagccaccaaactctatcagcggctgctgaccaaatgcgcgccgcccggcgtcgccggcttcaactggatggagtcgatggcttcctttacccagggacgcgccgcgatgtggatcgacgccaccggctgggcgccaccgatcgaagatccaaccgcctcgcgcgtgcccggcaaggtcggctacaccgtggtcccggccggacccaagggccacttctcatccacgtatggtgacggcctcggcatcgccgccgccagcaagaacaaggaagccgcctatctgctctgccaatgggcggtctcgcgcggccagggcacgcgcttgatccaggctggtggcggcgtgccgttccgtagctcgatcgtcgacgatcccgaggttgcgaagggcgtcaagaccaaggaatggctgcaatcggtgatcgattcctcgaagatctcgaagcttggcctgccggtgatcatcccggtcgccgagtatcgcgacatcgtcggcgcggcgctgaccgcgacgctgtcgggcgccgatcccgccaccgaattgaagaaggcgcacgatcagttccgcccgatcctggagcgcagtgaaaaagcgtgagcgtggtgacacaagcttctccggccgcggccgaaaccgccgcgccggagcgcgaatggcgcaagccatcctactggcccttcgtgatcccggccctggtggtggtgctcgcggtcatcatcttcccgtgggtcttcacgatctggatgagcttccaggaatggaaggtcggctcgcccaccaccttcgtcgggctcgccaactatttgcggctgccgaccgatccgcgcttcgtcgaagcggtcggccacacgctgtcctacacggcgctgtcggtcgtgctgccgctggtgtttggcacgctggcggctgtcgtgtttcaccagaaattcgccgcgcgcggctttctgcgcggcatcttcatcatgccgatgatggcaaccccggtggcgatcgcactggtgtggaccatgatgttccacccgcagctcggcgtgctgaactatctgctgtcgttggtcggcctgccgccgcagctctgggtgttcaacccgacgacggtgatcccctcgctggtgctggtcgagacctggcaatggacgccgctggtgatgctgatcgtgctcggcggcctcgccgcgatcccgaccgaaccctatgagagcgcgcagatcgacggcgccaatttctggcaggtgttccgcttcatcacgctacctctgatcatgccgttcctgttcatcgccggaatgatccggatgatcgatgcggtgaagagtttcgacatcatcttcgcgatcacccagggcgggccgggttcggcgtcggagaccatcaacgtctatctctacagcgtcgccttcgtctattacgacctcggctacggctcggcgatcgcggtggtgttcttcctcctcatcgtcgcgctggcggcgctgctgctgtacttgcgcaagcgcctgctgtggacctcgcagctcgggagcgaggcatgaacctgcgtcagatcctcgggcagatcgggctgtggctgtcggtgttcgtcatcgtctcgccggcgatcctgttcttcctctggatgggctcgctgtcgctgaaattcgagatcgacaacgcctcctatccgccggtgttcttcccggagcacatcgcctggaagaactatgccgacgtgttcgcgtccaaccgcttcctgacctatttcagcaacagcctgatcgtcaccggctgcgccacgggccttgcgatgctggtcggcgtgccggcgggctacgggattgcgcggatggcggcgcacaaatcggcgatcgtgatcctgatcgcgcgcatcacgccgggcctgtcgtatctgatcccgctgttcctgctgttccagtggctcggcctgctcggcacgctggtgccgcagatcatcatccatctcgtggtcacggtgccgatcgtgatctggatcatgatcggctatttcgagaccacgccgctggagctggaggaagccgcgctgatcgacggcgccacgcggtggcaggtgttccgccatgtcgcgctgccgatcgcgaggcccgggcttgcggtcgccttcatcctcgcggtgattttctcctggaacaacttcgtcttcggcatcgtgctggccgggcgcgagacccgcacgctgccggtcgcagtctacaacatgatctcgttcgaccaattgagctggggcccgctcgccgccgccgctttgatcgtgacggcgccggtgctgctgctcacagtgatggcgcagcggcagatcgtcgccgggctgacggcgggcgcggtgaagggtggctagaccaggccaatatgaagttatcggccgtcacgggggctcggccaaaatatcgcaaaacaaccccatgcaaagtagccgtcggcggccaaccttcgacgatgcaacttgacacgtcgggcaactcagggatattattctaatattccgaaatttggcgtcgtgccctagccggcgagcgccttcagcactgcggcggaatcggcgacccagccgaaaatgccgccctgggccttgatcatcttcaggcccatctcatggaattccgggaagtaggacgcgcagccgtccgagatcacgacgcagcgataaccgcggtcgttggcctcgcgcaccgtggtgttgacgcagacttcggtggtgacgccgcagaccagcagattctcgatgccgtatttcctgaggatgtcactgagctcggtggcgtagaacgcgcccttgccgggcttgtcgatcacgatctcgctgtccagcggatagagttcggggatgatgtcatgcccggcctcgccgcggatcaggatccgtcccatcggtccgggatcgccgatccgtaaggacggcgcgccgcgctcgagcttggccggcggcgcgtcggacagatcgggcagatggccctcacgggtatgaaccacgagcaggcctgcgtcgcgcaccaccgcgagcaccgcggcgatcggctgcaccgcgcgggcgagctggctgacgtcgttgccgagcgtctcgccgaagccgccaggctccatgaaatcgcgctgcatgtcgatgatgacgagcgcggtcctgctccagtcgagcgtgatcggcgccggctccgccgcgatggtcccgcctgaattcgccatggcgcacgctccgaatgcgagaagacccgcgcttgattaagcaaaccgcgtgccacgacgcaatcaccggcagctgatttgccgatcgtccgatcctgctggcatgatcgttgctagctgggagcccgaccgaacgaagatcatcgttcgcgaaatgacagcccatttcaacaggcgggaggacaggcatgaacggacttggcggcctcaacaagtcacccaacggcgtcgtgatcggactggtgcagctgcagctgcccgtggtcgcgaccagggccgatctggcgcggcagaccgagcgcatcgtctggatggtcggcaaggcgcggcgcaatctcgccaccatggacttggtcgtgtttcccgaatattcgctgcatggcctctcgatggataccaatccggagatcatgtgccggctcgacgggcccgaagtcgcagccttcaggcaggcctgcatcgacaacaagatctggggctgcttctccatcatggagttcaacccgcacggcaatccctacaattcaggactgatcatcgacgatcacggcgagatcaagctctactaccgcaaattccatccctggattccggtcgagccgtgggagccgggcgacatcggcattccggtgatcgacggaccgaagggcgcgaagctcgcgctgatcatctgccacgacggcatgttcccggaaatggcgcgcgaatgcgcctacaagggcgccgagatcatgatccgcaccgcgggatacaccgcgccgatccgcgacagctggcgcttcaccaaccaggccaatgcgttccagaacctgatggtgaccgccaatgtctgcatgtgcggctcggacggctcgttcgactcgatgggcgaaggcatgatcgtcaatttcgacggcagcatcatcgcgcacggcaccaccgggcgggccgacgagatcatcaccgccgaggtgcggcccgacctcgtgcgcgaggcgcggatcaattggggcgtcgagaacaacatctatcagctgtggcaccgcggctatgtcgcggtgaagggcggcgcgatggattgcccctacaccttcatgcaggacatggtgtccggccgcttccgtctgccctgggaggatcaggtcaagatcaccgacggcacgtcctgcggctttgccgcaccgacacggatgttcggcaagaccgcgaaagccgccgaatagccgccgcaagcggctatttgaagcagtgcacgagaccgatgctcaagcccaagagcagcatcagcgacagcgtcaccgcggccgtcacccggccgccgacggtcgagagcacacgcacatcgacgccaaggccgagcgcggccatcgagagcacggtgaggatcgccgccgtcctggtcaccggtgcgatcgcgatgtcgggcaccagctggaacgagcgcagcgcggccagcaccaggaaaccgatgatgaaccacggcaccagcttgaacgggctgatcgaggcggtctttgccgcgccctccttcgccggcccgccctcgcgccgccgcgccacgaccagcgagagggcgaccacgatcgggcccagcatcaggacgcgcaccagcttcaccagcgtgccgatctgggtcgagacgatgccggccggcacggtcgccgccagcacctgcggcacggcatagaccgtgagcccggcgagaatgccgtattgcgtcgcggtcagcttcaggagcgggatcaggagcggcaggccgagcaccatcagcacgccgaggatggcggtgaacgagatcgacgaggcgatgtcgtcgccatcggcctcgatcaccggcgccaccgccgcgatcgcggaattgccgcagatcgagttgccgcaggcgatcaggatcgcgagtttggtcttcagcccgagcaggcgggcgaggccatagctcaccgccagcatgaccacgaccgtcgcggcgatggcgccgatcaggagccagcccgacgccaggatcgcggcgaagctgatcgacgcgccgagcagcatcaccgcgacctcgagcagctgcttggcgctgaaggcgatccccgagcgccagcgctcggacgggtcccaggcggtccgcaccgccatcccgagcaggatcgcgaccaccagcgcctcgatataggggtggtcgaaaacccgctcctcggcggcctggatgccgagtgagatgacggtgaccgctccgcagagcagaatgcccggaatgagcaggatgatgcccttcagcaccccctgcatccgcccctgatgttgttcttgttccggcacaaaatcctcttttcggagaagattttatgcgccagaccccactcattggctaatatcttttcggactgccccgatagagagaagttatgtccctcaacctgcacctgctccgcctgttcgcggccgtggcgaggactggaagtttttcccgcgctgccgacctcctgcacatcagccagccggcgatctccaagggggtgcgggattttgagctgcaggtcggctgccggctgctcgaccgcacaccgaagggggtgcggccgacccgggagggcgcggcgctggcccggcatgccgagacgctgttcgcggccgagcgcgccgccgaggacgaattgcaggcgctgcgcaacctcgacagcggctcgctgcggatcggcgccagcacgacgatcgcgacctacatggtcccggaatatctcggcgtgttccaccgcgcctttcccggcatcgacctgcatgtcgtgagcgccaacaccagcgacatcgcggcgctgatgctcgggcatgagatcgagatcgcgctggtcgaagggccggtcgaggacgagaacctgaccagcgacgcctggcgcaccgacgtgatggtgttgatcgcaggccctgatcatcgcttcgcggctgccgcaggcccgatcgacgtccgccagctcaacgaagagatcctgatcgtgcgcgagccgggctccggcacgcgcgaggtggtggcacaggcgctggccgcccaccgcgtcgagccgcagcggacgctggagatcggcagcaccgaggcgatcaagcaggcggtcgcagcgggtgtcggggtcgcgatcgtatcggttgcaacgatcgacgatcaggtcaagctcggaaaactgaaggtgatcccgatcaagggcgtccacatcgagcgcacgctgtggcagctcaaatcgcccggccggctggatgtgccggcggcggtcgcgttcgaggggatcatccgggagacaagggccgcgaacacggcgccgcggacgcgggccgccagagcgcgatgagaccggagtaacgcccgctttcgcaggcaaagccgagacgcgatccgaccctggcaatatcatcttcttgtaacccgaagacgcgattaaacgaaaatgcggagcgcatacgtaccgccggattcgagaacggtccggacccgaatgccggatggctgaaaccaacgcttttgaccaatagagacttcgctccgcgcggccgcttactgctcgtttccaagtaagttgatccaaatcaacatggctcggacgagagcacgttatttgcgagccggtcgtgaaacgttcaactgaaggaggagcgcatgaagcccctttctgaacaactcgccgaattgtcggtgcgcgcaagaaacgccgaagctgcgtttgcagccgcacaaaaggaagcgcgtgacaagatcgaagcgcgcaaaacggaggcgctttcggctgcaaagacagcagtcgaaaagatcagccagcaaatcaagtcggtcggcgagtctgccagcagagacaggcaagcgctgcaagcaaagatcactgcggacgtgaacaccttgaaggcgtacgcgctccaggcaaagcatgatatcaaggcgaacctcgccgaggaccgcgcaaaccttctggaagaagacgccggattcgccgtcgactacgccatagcgtcggtcgaacaggcacaactcgccgtcctcgacgcgatcgatgctcgtcttgcagccgagcaggctagacgcagctagctctgcaaaccgaagccgcctccgttcgcggcttctttcatatcacgcagcgaatcggttgagtgattacggtctatcgagagagtaagagcccttatacgagagataggccgagaccaaaccatcctgcgcctcagagcgcggcgaacagaccctgcgcccaggcaacgacacgctcgaagctgaacacgccgggctcgaaatacaccgcgcgtgccagcacgatgccgaccaccagcacccagaacacgccggtgcccgcggtcttcagccatttcgacacggcctcgctcccggccgaggaatcgaccgcgggaaccggctcaccgaagggatcgaatgcggattggctcatcgtcgcgaccatcagggactgccgtgacaatgtcgcgacggcgggggcagaagcaagggtcccggaatgccttttgcacccgtaccttggaaggacgttttccgactccctggccggggagtatttccttctcggctacctgatccggcctcagctgtccgtcccgcgctgcggggcgatgagcggcagcgtgatccgcacgcgcgttcccatgcctggggcactgtcgagatgcagttctccgcccagacggttggtgacgatgttgtgcacgatgtgcaggccaagcccgatccggccgatgtcgcggcgcgtggtgaagaagggatcgaaggcctgccgcagcacgtcgcggtccatcccgcagccgtcatcggcgaacaggatctcgacccggtccgcgcctgacgcgcgcagccggatcgtgatggtgccgcccttgccgtccggaaatgcatgcgcgaccgcattgacgaacagattggtcagcacctgaccgtaaggaccgggatagctgttcatcgccagacccgacggacaatcgacctcgagcgccagattgttcttcggcaacgccgggcgcaggttcgaaagaacttgttccgtcacctcgccgagatcgaacgcgctgcgatcgaaatagctgcgatcgacggcgacctgcttgaatgactgcaccaggtccgctgcgcgcttgaggttgccgaccaagagcgacgacgcgctttcgacgacctcgatgaaatcgctcagactcgagcgcttcagcttgccgcgcgctgcctcggcggcgaagtcggcgcatttctgctccagcaccgaggcgaccgtgaggctggtgccgaccgggctgttgatctcatgcgcgacgccggccaccagccggcccagcgccgcgagcttctccgcctcgatcagcgacgcctgggtctcctgcagatgatgcaaggccttctcggccgcatcccgcgccgcgcggatctcgcgttcgctgcgcttgcgatcggtgatctcctcagccgcaacgttgacgccgacgatgctgccgttcggctcgcgctgcggatgccaatgcgtgatccagcatcgctcgtcattgtggcccggacgctggccgtagacctcgacgccggtcacgggctcgccggtctccatgatcgagcgaacgatgccttcgaccgcggtggccagcgcgggcacgcaatcatgcacggtgcgtccgagatggccttcgaccgagatgccgcagatctcggtgagccgctgattgatctggagataacggcagtccggagagaggtaggcgagaccgatcggtgcagtgtcgtagatcagctgcagcgccggttgttttgggaactgaacgtcctggacgacggacgaccgcatgtccttccccccgttggcaccaagtctagccgttcacggccggcgcgcaaataggccgactgtgccaggcaacggcgatcaaatctgtccagattcggcacggacggacgaccgcccagccgcggcaccttcacatattcactgtaccgtgcggtcggaaattctcgacgaaacgcagcagcacccgcgcgccggtgtcggcgtcggcgagctcgacgtgctcggccggattgtggctgatcccgccgcggcagcgcacgaagatcatgccgatatcggcgacatcgaccatcgccatgccgtcgtgccctgccccgctcggcagttcgaacacggtatggccctcggctgcgacagcctcggcgatctgcgccttcagccatggcgcgcagggcacgctgcggttctcgtgggtgacgtcgatctgcagcgcgagctcgcgtcgctttgcgatcgcctcgatctgccgcacgatgtcggcgaccgcgcgtttgcgatgcatgtcgctctgcgagcggatgtccatggtgaaggacaccttgcccgggatcacgttggtggcgccgggcatcgcgttgatatagccgacggtgccgacgaggccggcttcatcgctccggcagaattgctcgatcgcaacgatgcattcggcggcgcccgccagcgcatcccgccgcagcggcatcggcacggtgccggcatggccggcgaatcctgtgagactggcggcgagccgcgtcgcacctgaaatcgcggagacgacaccgaccggcagcgccttctgttccagcacgggcccctgctcgatgtgcagctcgacatagccgagcagctcgcgacgcacgcgcgccgccttgccgatatgatcgggatcgaggccgaaggcgatcagcgcatcgcgcatcgagatgccggcgcggtcgcttgtgttgagcacgctctcgtcgaacgtgccggcaaccgcccggctgccgagcagggtcgaggcgaagcgcacgccctcctcgtccgcgaagcccacgatctcgattgcgaacggcagccgcttgccccgccggttgaggtcggcgacgcaggcgatcgcggtgatgacgccaagcgggccgtcccaccttccggcatcgcgcacggtgtcgtaatgcgagccgagcatcaacgccggcaggcccggccgctcgccctcgtagcggccgcagacattgccgatcgcatcgagatgcgcgctcatgccggcctcgcgcatccaggacaggatgaggtcggccgccttgcgatgctcctcggtgaggaaaatgcgcgccagatgctccggcgtctccgagatcgccgcgagctgatcgatccgcgccacgatctcgtcgccaagggaagacggattcttctcgctcatactgtttcccatcggtcgaaccggcgccggagcccactccactcgtagcaggcccggtccgattcaccagccggcaaatgccgccttccggccgggcgcgcatcggccgctcggcggttagcggctgcttaacggcattgcatacaatgaggattgatcgcatacaaattaggcaattttggctctgccgattccaaaggcgaaccacgtcgaccgtcgttcgcattcataatcagctacttacggaaccgtgatcgccaaacgtgctctggcatgaagcttgcgacactctgtcaagcgccgccgttacggcggctgcacaaggacaggcgggcccgccccgccggagggagcaggcgatggattttagcaggatttcgagaaggcatttattgcagggaagcgcggcattggcgctaggcagctcgctcggcgttcgcggcgctgcggctgcggaaaccacggtcggcttcatctatgtcgggtcccgcgacgactacggctacaaccaggcccacgcccagggcgccgcggcgctgaagaagctgcccggcatcaaggtggtcgaggaagagaaggtgccggagaccgacgcggtcgagaagaccatcgagtccatgatcaacctcgacggcgcctcgctgctgtttccgacctcgttcggctactacaacccgcacgttctcaagatggcggccaagtttccgaagatgcacttcgagcattgcggcggcctgtggaccgacaaggacccgaagaacgccggcagctatttcggctacatcgacgaggcgcaatacatctccggcatcgtcgccggctattcgaccaagagcggcaagctcggcttcgtcgccgccaagccgatcccgcaggtgctgcgcaacatcaacgccttcacgctcggcgcccggctcgccaatccgaaggcgacgacgcaggtgatcttcaccggcgactggtcgatgccggtcaaggaagccgaggccaccaacagcctgatcgaccagggcgtcgacgtgctgacctgccatgtcgacggaccgaagacgatggtcgagaacgccgcgcgccgcggcgcgatggtgtgcggctatcacgtcaaccagtcgccgttggccccgaaggcctatctcaccggcgccgagtggaactgggaggcgctgtatccgaagttcgtcaagatgatcgtggcgggcgaagcgatcccgaacttctatcgcggcggcctgaaggaagagatcgtcaaggtctcgccctatggcgagatggtctcggcggaagcacgcaagcatgccgacgacgtcaaggccaagttcatgtccggcgaatacacgatcttcaagggcccgatcgccgacaacaagggcaagacggtgatcgccggcggcaccgatcgcggccagcaggatcccgaactcgagaagatggactatctggtcgagggcgtgatcggagccaccgcgtgacgaccgaggcggcggaatcggtggaggcggccggcgttgctccggccgccgatcccggcttcctccagcgctacggcgcgagcatcgaatatatcctgatccccggcgcggcgctggtcggcgcgctcgcggtgttcggcatcttcgtcgcgctctacggcaagaacccgctcgatctctatttctacatgtattacggcgcgttcggcaccgccttctcctggcagaacacgctgacccgcgccgcgcccctgatcctgaccgcgctgtgcacggcgctgccggcgcagctcggcatggtgatcatcggaggcgaaggcgcgctgctgatcggcgcgctgtcggcgacatcggcggcgctggcgctgcaaggtgcggcgccgctcgtggtgcagatcgcgatggtgatcgcgggcatgatcggcggcggcctctggatcatgctgtcgggcggcctgcggcagtatcgcggggtcaacgagacgatctcgagcctgctgctggtgtatatcgcgctggcgatcctcaaccatctggtcgagggaccgatgcgcgatccggcgagccttaacaagccgtcgacccgcgagatcggcgccgccaacatgatcggcacgattcccggcaccgacgtgcattggggcctggtgttcggcctggtggcagccattgccgcctacatcctgatctatcacaccacgttcggcttcgccgcgcgcgttgccggcggcaacatccgcgccgccaagatcgtcgggctttcggtcggcaagctgatcctgaccgtctgcttcctcgccggcagctgcgccgggctcgccggcatgatcgaggtcgcggcggtgcagggccgcaccaacgccaacctcgccgcgggctacggcttcaccggcatcctggtcgcgttcctggcgcggcagaatccgctggcgatcattccggtggcgatcctgctcggcggcatctcggcctccggcggactgttgcagcggcggctcggcctgcccgacgcctcggtgctggtgctgcaaggcatcatcttcgtgttcgtactggcgagcgacgcgctttacggacggatcggcttcctgaagggaaagtcctgacatggcggacgcatcgctcgggctctggaccgtcccgctcgctgtgttcggcggcgccatccgcgtctcgacgccgtttttgttcgtcagcctcggcgagtgcatcaccgagcgatccggccgcatcaatctcggtctcgagggcacgctggtgatgggcgcgctgagcgcctatggcatctcctatctctccggctcgccatggctcggcgtgctcgcggccggcatcaccggcgcgctgttcggcgcgctgcatgccgggatctgctcgctgccgcgcgtcaacgacatcgcggtcggcatcgcgctgatgctgctcggcaccggactcgcgttcttcctcggcaagccactgatcgagccgaccgcggcacggctgccggcgatcgatttcggctggtggagcgacatcccgcagctccgcgcggcgctgcgcatcaacgtgctgttcctgatcggcgtcgcgatcgcgccgctgctgtactgggcattcaggaccacgcgctggggcctgttgatccgcaccgccggcgagagcgcggacgcggcgcgtgcgatgggccattcggtgcttctgatcaggctgcgcgccaccatggtcggtggcttcctcgccggcatcggcggctcgttcctgtcgctgttctatcccggcagctggaacgaaggcctctcctcgggacaaggcatcaccgccgtggcgctggtgatcttcgcgcgctgggacccgatgctgtgcctgtgggcctcgctcgccttcggcggcgccgcagccctcgggccggcgctgcaatcggtcggcattacctccggctatcatttgttcaacgccgcgccctacatcctgaccctggcgatcatgatcatcacctgctcgccgaagcgcacgctgaccggcgcaccggccgaattgtccatcacccgatagaccgcgagatcattcatgcccgagcgcttcatcaaatccgagccctacgcctggccctacaacggcgacctgcggccggagaacaccgcgctcatcatcatcgacatgcagaccgatttctgcggcgtcggcggctatgtcgacaagatgggctatgacctctcgctcacgcgggcgccgatcgagccgatcaagaagctgctcgcggtgatgcgcgcgcagggttttcacatcatccacacccgcgaaggccaccggcctgacctggccgacctgccagacaacaaacgctggcgctcgcgccagatcggcgccgggatcggcgaccccggtccgtgcggccgcatcctggtgcgcggcgagccgggctgggacatcatccccgatctggcgccgctgccgggcgagcccatcatcgacaagcccggcaagggctcgttctgcgccaccgacctcgaactgatgctgcggctgcgcggcatcgagaacatcgtgctgaccggcatcaccaccgacgtctgcgtccacaccacgatgcgcgaggccaacgaccgcggcttcgaatgcgtgctggtcgaggactgctgcggcgcgaccgaccggagcaaccacgaccacgcgctgaagatgatcaagatgcagggcggcgtgttcggcgcggtgaccagatccgccgacctgatcggagcgctgtcgtgatcatcggcgaaccgcccgcaccgtcaggcgcgttcggcgtcgacgccatcgccgtgacgatgcggttcggcgactttctcgcgctcgacaatgtcgaactgaaagtgcgccccggctcgttccacgccctgctgggcgagaacggcgcgggcaagagcacgctcgtgaaatgcatcatgggctattaccacgccaccgagggcgacatcatcgtcggcggccgccagcagagcatagccaatccgaagaacgcgcatgcgctcggtctcggcatggtctaccagcactttaccctcgtgccggcgatgacggtcgccgagaacctggtcctggcacgcgacgacgtgccctcgatcgtcgattggcgcaaggagaagaaggagcttgaggccttcctggcgcggatgccgttcaaggtgccgctcgacgcaaaagtctccgacatctccgccggcgaacggcagaaatgcgagatcctcaagcagctctatctgaagcgccgcttcctgatcctggacgagccgacctcggtgctgacgccgggcgaagccgacgaagtgctcggcatgctgcgcgcgatggtcgtcgcgggcgaactgaccatcctgatgatcacgcacaagttccgcgaggtgatggcgtttgccgacgaggtgacgatcctgcgccgcggcaagctcgccggcaccggccgggtcgccgacctcacgcccgacgagatggcccgcaccatgatcggcgccgagcagctgacggtgcagccgccgcgcaccggcgagaccggcgcagcgcggctcgagctcgacagactcaccgcgcttgacgatgccggcgcgatcgcggtgcatggcgtctcgctgacggtgaagagcggcgagatcgtcggcatcgccggcgtctccggcaacggccagcgccaactggtcgaggtgctggccggccagcgcgaggccgagagcggcgtgatccgcgtccagggcgaggcctatgcggcgagccgcgaggagatgcggcggcacaggatgtcactgctgccggaggagccgctgaagaacgcctgtgtcggcggcatgagcgtcgccgacaacatcgcgtttcgtgaattcgaccgcgccccgttcgcccgcggcggctggtggctgaacggcaaagcgttcaggagcgatgcggagcgcaagatcaaccgctacaagatcaagacccgcacgccggagacgccgattgccgcgctctccggcggcaacgtgcagcgcgcggtgctggcacgcgagctgtcgggcgacgtcgaagtgctgatcgccgccaatccctgcttcgggctcgacttcgctgcggtggcgcagatccatgccgagatcatggccgcccgcaaccgtggcgcggcggtgcttttggtcagcgaagacctcgacgagctcttggagttgtcggatcggctggtcgtgatgttccacggcgcgttcgtccacgaggcccgggccagcgaagccgacctcaccgagatcggccggcatatggcggggcattgaggttctccctcacccggaacgcatctggcgatgcgttccggcctttccccgcaggcagcatgacaaaagttcggtgtcgtcccggcgtaggccgggaccaataaccacagggccttgttgttgaacaaggctgtgcccccagctcgattttatcaccacgccctgtggttttgggtcccggatctgcgctgcgcttgtccgggacgacgaagttctttgccatatgcgattgccctgccgcaggcgaggcgaagtggccacgagtcgctaacgaccgcgctagccgatctcgaacgcctgctcagcgagatgcctgagattggcctgccagtgctcggcgatctgaagccgggtcggcacccagacgtgctcgtgcttcccgatgtaatcgaggaagcgcatcagcgcggccgcgcgaccaggacggccgacgacacggcaatgcaggccgaccgacatcattttcggtgacgtcgcgccctcggcatagagcacgtcgaaactatccttcagataggtgtagaactcgtcgccgccgccaaaaccctgtgcgttgatgaagcgcatgtcgttggcatcgagcgtataggggatcacgagatgcggctcggtgccggcagccttgatccagtacggcagatcgtcggcataggaatcgcagagatagcgcagaccgcccgcttccatcaaaatccgcagcgtgttgatcgaggagcggccggtgtaccagccgagcggccgcgcgccggtcgcctcggtatgcacggcgatggcgcgcgcgatctccgcgcgctcctcgtcctccgacatgtccctgtgctcgacccagcgcaggctgtggcttgcgatatcccagcccgcctcctgcatcgcggcgaccacatccggattgcgcttcagcgccatcgcgacgccgaacaccgtcgccggcagcttccgctcggtgaacatccgccacagccgccagaagccggcgcgcgagccatattcgaacatcgtttcgatattggcgtgacgctggccgacccagggctgcgcgccgagcacgtccgacaggaacgcttccgaggcgcgatcgccgtgcaggatgttgttctcgccaccctcctcgaaattgaccacgaactgcacggcgatccgcgcagcatccggccatttcggatccggcgggttgcggccgtagccgcggagatcgcgcggatagcgggcctcggtcacatcagatttcctcgaaccggatgttctgcgcgcccttccacagcacggtcttgccgaacgcggtgaggttctccagccccgaggtcagcgtgatgaaatgattgccggcgagctggcccatcttgctggcgaagtgcacgccgccataggcgagcaggatctcggtctcgctgatgccgccgggatagaggatgatctggcccggcgccggatagctggtgtggttctcgtaggagacgccgaaatcgagatcgccgagcggcatccagacgccttcgccgctccagcgcacgtggatcgcctggctctcgaacggcatcgccttgcggaacgcggcgaccgtcttcggcgccagctgttcctcgaaacgggcgtcaaaggtgaaatcgccggcgcggacaatcagtttgctcatcggactctcgtggtagctggaagaagtgataccccaaccattgccgccggcccgcgccggacgcaaggccgattccggccccggaagccggtttttcgccgcatgccggctgcggcaacgcagatttgagcagggttgcattgcgccgcgtcgccccgtttgcgaacctgtgagggcacgtcaaacagggtgcccagatgacgacaaacagtctgcacggacatgtggcgctggtgaccggcggatcgcgcggcattggtgctgcgatcgtcaagatgctggcggaggccggtgctgccgtcgcgatcaattaccgcgaacgctcggccgaagccgagacattggcgaagggcatcattgccgccggcagccgggcggttgcgattgccgccgacgtctcggaagcagccgccgtcgccgcgctggtcgaacgtgccaaatccgagctcggcccggtcgacattctcgtcaacaatgccggcatcgcgatcgtcaggggtgtcgacgacctcaccgaggaggatttcgaccgcaccatcacggtcaacctcaaatcggcgtttctctgcacgcaggcggtgctgccgatgatgcgcacccggaaatggggccgcatcgtcaacatctcctccggtgccgcgcgtggcgccggtgcaatcgggccgcactacaatgcatcgaaggcggctgtggaaggcttgacccgcggttatgccgcgcgcctcgtcaaggaaggcatcaccgtcaacgcggtggcgccctcactgatcgagaccgacatgatgaagggacagagtagcctggtcagccgcatcccggtcggccgcttcggcaccgtcgaggaagtcgcgcaggccgtgatgctgctggtcaacaatccctacatgaccggacagaccatcgcgatgagcggcggcatggcgttcaactaagttcccgagcacgatcgaccgcgatctcgccgcgcatgaggcctgggcgcacgaaaatccgccgtcggcaaccgcgcgcattgagcggatcacgcaagcgatgccgtttcgtcagctcacgcgaatccggtagctgagcgatcggcgcgcgccgggcgcaatctgcagcaggccgggcttgtcggcgaactcgccttcgaactccgccggactggcataaccgtgccacggctcgatgcagaggaacggggccccgccaaccttcgaccagacgccaagctcgcggaatccacgccaggagatttcgatcgccgggccttgcgtggctgctgccgggcccagtgtcgccgtgaacaggatcgatgtacttgcgatctgatcgaagaccatcgcgtcgtcatcgaacagctcctccgtcagcgcaagcgttctgcccttgaccggattgggctcaggctgcggccgcatcaatccatccttcaaccgccggatcggcgcgggttcagtcttgccgaaagtcagcgtgtaggcctccttcggcagccccggcaccagcggccaattgaacgcgggatgaccgccgagcgaggccggcagcatctcgtcgccggtgttgatgatctcgaaaccgacctcgagatctgcgccgtcaacggcataggtgacctccagcctgaacgcgaaaggatagcgcgcccgcgtttccgcatcgtctgacagcgcgagcttgcacgactgggtcccctgctccacccaggcaaagcggcgatcgcgcgcgaagccgtgctgcgtcatcggataggtcttgccgtcgtggcgaagcctgtcgttcttcaaccggccgacgatcgggaacaggatcggcgcatggcgtggccattgcgggccggcctgccacagcagctcccttccctcggcattcctgagcgacgacaattcggcgccttgggcgttgatggttgcggcaatcccgtcgccgcgcagggtgtgactgtcggtcatggctggcctcgtcggggttgcactgtgccccgccacgagatgttcgatgccggcgaagccgtcaacccaaaagcgatggggccgcccccgcgtagcggccccggggcgccaagcctaaccgctgatcttggagaaatccggctggcgacgctcggcaaaggccgcaaacgcctcgcgcgcttcggcgctcatcagccgctcctggaagatcttgccctcgcgcgccatttgcgcgctgatcccagcgggatcgcgcatcaacgccttggtgtgctgcagcgagccgaacggccgcttcgccaatgcgtcagcagcagcgcgtgccttggcacgaagatccgcgagcggcacgacggcattggcaagaccgatggagaccgcagtctcggcctcgaccggttcacccagcgcgaacatcgcataggcgcgcgcatagccgatccgttgcggcagcaggtaggtcgaggccgcctccggcaccagcgccagattgacgaacggcgtgatcagccgcgcggtcggcgcgaggtagacgaggtcgcaatgcagcaacatggtggtgccgatgccgaccgcattgccctgcacggccgcaaccagcggccgcgtcgccttggcaagacagccaaggaaacggctcacgtgacgctcgccctgcacgccgcgcgacaccgcggcgaaatcgacgagctcgttgccggcagtaaaactgtcgccgtcgccctgcaacagcacggcgcggatcgcggtatcgctttcagcgcgctgcagcgcatcggccattgcgccatacatcgcattggtaatcgcattcttcttgtccggacgcgccatcgtcacggtgaggacgccaccgtccagcgttacgaccacctcactcatgctctcactcctgttgcttgctgcttgtctgacgcgttcgcttcgcgcgaacgggtgccggcttcgctcgcgaacgctaaccgtccctgtcctttggaaacttgtcttgcaggctggtcagccagcgcgataccacgtcgatctcggcttccgagaagccatccatcaggcggttgttgatcaccctggtccgcgtcgcggcacgcttgccgagctcctgccccgccgaggtcagatggagccgctggctgcgcccgtcctcgccgtcgcgccggcgcttcacgaggcccgcgcgctccatccggtcggcaagaccggtcatcgccgacggcacgatgtcgagcgcctgcgacacgtcgccgatcagcgcgccgtcgttgcggccgaggaagaacagcacgccggcctgggccgacgtcagatcgtgcgcggccgtctcctgatcgatggcgcgttgcagccgtcgataggccacggtcagaaggaagatcagccggtgttccgctttcatacacgccgttatatatttcgcgtacgaaatatcaacatgtttcgcacgcgaaacattttgatatttgccgccatcggttgcgacacctccaaaaactccggcgacagaacccatatgctggctggaatgagccccgtcgagcggggtcgattgcgacattttgatcgcgccgccggagcgtcgcatcgcggccgcgcagaaaacccttgatcgacaacgatcaaacgggaaatctccatccgggagccgcatttgcgttgcggctccggcggcgccacgggagtgtcatgtcggcagcggcaagtccggacagggagcgcgtcgtccgcccgaagcggccgcgtcatctcagccaggccatgcgttgcgagaccgcgtttcgcctgatcctgtccgaatgcctcgaggaggtcgcgaccaaccacgaggcgctgagctccggcgatcccgcagcgctccaccagacccggatcgcactgacccggctgaaggcggcggtcgccttctacggcccgatggtggccgacagcgaatggacgcgattgaagtccgaactgaaatggctgagcgcccatctcggcgcgacgcgcgatctcgacgtggcgatcgcgaacagcaagggcttgcccgaggagcgcatgctccagacggcgcgaaccgacgcgttcgacgccctcaaggaagcgctgcaaagcgaccgatactggcgatggttcgacggcatgtgggactgggtcggcagcggcccctggaccacgcggcagaaccgccgcgccgcgcagcggcgtgcggtaccggtcgcagtgtttcacgcccgccggctcgcgcggtggcatggcaagctgtgccagaggagccgcgggctgcaaggcatgggcaagaacaagcgccaccgcgtccggctcgccagcaagcggctgcgctacgccatcgagttctcggagggcggcttgcctgccgatgtctacgcatcatggcggaacgtgctgaagcatctgcgaaagggacagcagctgctcggcgagttgaacgatgacgaggtgcgccgcgcgttggtcgaaagtgctgatgccctggcgcagcgcgcccaggagcgcaaggccaagcaccagcgcgtgcacgagcggaagcgcaagagcaagctgctgcgccgcgctgcggacgtctaccgaaagatcgccgactgagcacccagcagcggattcttgcccgcacgcggcatcgatcgcgccgatagtccgcccataaatgatgtataaaacattacttattgcacttgcaacatcattacttaatatgcatagatgacattcagctagacccgactcccaaccgacggcccgatcgatgatcactgcagcgcagcttcgggctgcaagagccttgcttggcatcgaccagcggcagctcgccgagctgtccgggttgtcggtgccgaccatccagcgcatggaagcaagcgaaggcaccattcgaggcaatgtcgactcgctggtgaaactgatcgacgcactcggtgcggccggcgtcgaggtcatcggcgagggcgccgtcagcagcggcggcggccgcggcgtacgattgagggccgggtcaggctcgccgaaggtgcagacgtgatctcaacggtcgcccagcagctctggtgtgtagccgcgctgctggcgacgaccattctcgcgattgccaccagccgatcacgccgatcgacagccgtcgtctacggcgcgacctttgccatctcggcgatcgcgctggccgcggcgctgcacgcgctgatcgcccacagcaatgcgaccgaactgatgttgccggtcggcctgccctggctgggctcgcatttccgtctcgatgcgctcgccgcattctttctcgcggtggtcaatctcggcggtgcggccgcaagcctgtatgggctcggctacggcagccacgaatcgacgccgcaacgcgtcctgccgttctttccggcgttcctcgccggaatgaatctcgttgtgcttgccgacgacgcgttcacctatctgctgtgctgggaattcatgtcgctcgcgtcgtgggcgctcgtcatggcgcaccaccgtgaagcagacaatgctcgggcgggctacgtctatctcgtgatggcaagcttcgggaccctggctctgctgcttgcgtttggcctgctgtcgggagccggcggcagttacagctttgcggccatgcgcggcgtccagcacacgccgttcgaagccgcgctggtgcttgcgctgatgctgctcggcgccgggtcgaaggccggcctggtcccgctgcatgtatggctgccgctcgctcaccccgcggccccgagccatgtctcggcgctgatgagcggcgtgatgacgaaggtcgcggtctacggattcatccgcgtcgtgttcgatctgctcggaccgccgaactggtcggcgggtgtcgtcgttctcgtgctcggcggagtgaccgcggtgatggggatcctctatgcgctgatggagaaggatctcaagcgcctgctcgcctacagcacgatcgagaacatcggcgtcgtgttcgcgagcctcggtctcgcattggcgtttcaggcgaacggctacggcctggcggcggccctcgctttcacagccgcgctgttccacgtcctcaaccattcgttcttcaagagcctgctgttcttcggcgccggtgcggtgctgacggccaccggcgaacgcgacatggagaaactgggcggcctgatccaccgcatgccgcttaccagcttcgtctttctcgtcggctgcgttgcgatctcggcgcttccgccgttcaacgggttcgtatcggaatggctgatgttccaggcggtcctgcaaagccccgatctgccacaatggatgctgaagatcatggtgcccgcggtcggcgcgttgctggcgctggcggcagcgctcgcggccgcgtgcttcgtcaaggccttcgggatcaccttcctcggccgcgcgcgaagcccggccgctgaggccgccggcgaggtcgatcgctatagcctcgccgcgatgtttggcctcgccgcgctgtgcttcctcgccggaattctgccgggcctggtgatcgacgcgctgtcgcccgtcgcaatggccgtgatcggcaaccgaatgccggttcaggcgagcgacgcctggctttcgatcgttccgatcgaggagagccgcagctcctacaacggattgctcgtcttcatcttcatcacggctgcggcatcgcttgccgtgtatttcatccatcggtttgcatcgcgcgcgatcaggcgcgggcccgcctggggttgcggctttaccgatccggctccggcggcgcaatattccggagtaagcttcgtccagccgatccgccgcgtgttcggcacattgatcttccaggcccgcgaacacgtcgacatgccgccgccgggtgacttgcggccggcccgcctcaggatcgacatgcacgatccagtctgggaacggctctacacgccggtgaccgaaacggtgtggttctttgccgatcggctgaaccagctccagttcctcaccatccgccgctatctcagcctggtcttcgcaaccctcgtcacattgctgctggcgctcgcgatatggtcgtgatctcggacatcctcgttcaactgggccagatgacgcttgttctgctgcttgcgccgctcctgaccggcgtcgtgcgcaagatgaaggctcgcctgctacgccgcaaaggaccatcgatcgtccagccgtatcgtgatctgctgcggttgcttcgcaaggaagtcgttctggccgaaaacgcgtcctggctgttccgcgtcacaccctacatcacgttcgccgcgatctgggtcgccgcggcattggtcccgacatttgccaccggccttgagttcagctggagtgccgacctgatcgcaatcgtcgccctgctcggcagcgcgcgcttcttcctcgcgcttgccggcatggatgtcggcaccagcttcggcggcatcggctccagccgcgaggtgatgatcgccgcgctcgccgaaccggccatgctgttgatggtgttctgcgtcgcgctaatcgccggctcgacccagctgtcgacggtcgcgaccttcatggcgtcatccgaagtgggcctgcgcgtctcgctcggcatggcgatgattgccctcatcatggtggcgctcgccgagaacgcccgtattccaatcgacaacccggccacgcatctggagctgaccatggtgcatgaggcgatgatcctggaatattccggacgccatctcgccatgatcgagttcggcgcctttctcaagctccagctctacgtctcgctgatcatctgcgtgttctttccctggcagatcaccaccgaaggcgcaggcccgctatcctacctcgtgagcgtcgccgcctacatcctcaagctcgtgatcgcaagcttcctgcttgcgatgttcgagaccgcgacggcgaaggtgcgggtcttccgtgttcccgagttcctcggcgccgcgctcatgctgggcctgctcggtacgcttctccggttcgtatcgcgaggcttctgatgcacaacctcgccttcgacattgctcatctgctcgccggcgggctcgtgctgatcagcttcatgatgctgtatcaggatcgcctgtatgcgttgctgaacatctttgcagctcatgccgtggtgctcgcgctctccgtcgcctggcaggcattcatccagaacgcaccgcatctctacgtgaccgcggtcatcgcactggtcttcaaggcgatcatcattccggtggcgctgcaccggatcgtcaagcagctcggcattcatcgcgatatcgagaccgcagtcggtatcggcccgaccatgctggccggcatgggcctcgtcgccctctcgatggtactgatgctgcgggtgaccggcgcggccgatccgctggcgagggaagatctcgccttcgcgctgtcggtggtgctgctgggactgctcgtcatggtgacgcggcgcaacgccgtcagccaggtcgtcggcttcatgtcgctggaaaacggattggtgctggccgcgaccggcgccaagggcatgccgctggtcgtggagatcagcgtggctttctcgatcctgatcgcgttcatcgtcatcggcgtgttcctgttccggatccgggagcgcttcgacaccgtcgatgtcggtgcgctcgatgagttcaggggggagcggcgatgaacgcggcgtcggatgccgttgcctggattctcctgataccgatctgcgccgcagcggtgctggcggcgctgcccggctatcggctgaccgcggggctcaatatcgttgccagcttcagcaccttcctggctgcgctttcgctgctcgtcgtcgcccgcccgcaacccggcccgtatctgctggtcgatgatctcaacatcgtcttcatcgtgctcaacaccttcgtcggtctaaccacgagcgtgttcagcgcgagctacattgctcatgagctcgagaccggacggctgacgccgcgctatctgcgattctaccatgccatgtatcaggtcatgatgttcggcatgaacctcgcattcgtgtcgaacaatatcggcctgatgtgggtcgcgatcgagatcgcgacgctcaccaccgtcttgatggtcggcatctaccggacccacgcggcgctggaggctgcctggaaatatttcatcctcggcagcgtcggcatcgcgctcgcgctgtttggtaccatcctggtctacatggccgcgctgccggtcgtcggcgagggtcaggacgcgatggtctggacagtgctggtcagccgcgccgcggcattcgattcggcattgctcaacgttgccttcatcttcctgctgctcggatacgggaccaaggttggcctcgcgccgctgcacgcctggctgccggatgcgcacgccgagggcccgaccccgatctccgccgtgctctccggcctgctgctcaacgtcgcgctctacgcggtgctccgcttcaagatcctgcttgccgccaatccggacgcgatatcaccgggtccgctgatggtgacgatggggctgacctcgttgctgttcgcggccttcatgctctaccgccgccgcgatatcaaacggctgttcgcctattcctcgatcgagcatatgggcatcatcgtgtttgcattcgggatgggcggcccgctcgccaacttcgccggcctgctgcacatggtgatgcacagcctgacaaagtcggggatcttctacgcggtcggccacatcgcgcaggtgaagggcacgcagcggatcgccaacattcgcggcctgactgaaacccatcccgcgctcggctggggcctggtgatcggcgttgtcgcaatcgccggtctgccgccgctcggtatcttcatgagcgaatttctcatcgtcagctcgaccttcgcgcgccagccgctgctcgcgatcccgctggtctttggcctgctgctcgccttcggcgcgctcgtgctgcgcctgacgagccttgcgttcggcgagccgcgcggcagtgcggcgccggccgaagcgtcctatttgccgatgttcgcgcatttcgcgctggtgctgactgcgggcatctatcttccgagaccgctcgttgtctggttccaacacgtcgccaacctcctgggctagcgcgagggagaacgagacatgccggcattgatcgatctgatccgggcaggccgcagagttgaacggcatcacccatggccgcgcgtcagcgtcgacggcggcacctggcgctccgccgccggcgcccttgcggacggcagcctgagcttgctcggactgtggggcgagccgtcgcgcgtgcatatggcgctgcttgacaacagcacatccaatattggtgtgatcagcctggattgccccgatcgccgctacccctccgtcgccgcccgccatcgcccggcgcttcgaccggagcgcaccatccacgacctgttcggactcgtggccaccgcgacgccggacagccgcccctggctcgatcatggtcgctggcaaatgcaggcaccgctgggccaacgtctcgatgcggcaccggatccagcgccttatccgttccttccggccgaaggtgacagcctgcaccagattgcggtcggccccgtgcatgccggcatcatcgaacccggacatttccgcttcaccgccagcggcgagaccgtggttcgcctcgagcagcggctcggctacacccataagggggtcgaagggttgatggcgggacgcaccgtcgagcaggccgcgcggttggccggccgggtgtccggcgacagcacggttgcctatgcactggcgttcgcgcaagccgtcgaggccgcgcagcagattgcggtgccgccgcgcgcggtgttgctgcgcgcgctgatggccgagctcgagcggctggccaaccatctcggcgacatcggcgcgatctgcaacgacgcgtcgttcgcgctcatgcatgcgcattgcggcgtgctgcgcgaacaggtgctgcgctcggctgacgccgcattcggccaccgcctgatgcgcgacatcgtcgttcccggtggcctggcacgcgacatcgccggcgaaggacctgcggcaatccgggccgcgctcgagcagatccgccggcattttccatcgctggtcgagctctatgacaacacggcatcgttgcaggaccgaaccgtcggcaccggcatcgtcaccgcggcactcgcaactcaattcggcgccggcggctatgtcggacgcgccagcggccgcacctacgatgcccgccgcagccccggctatcacccctatgatggcctgcgcttcgatgtgcctacgctctacgacggcgacgtgaacgcccgcgtctggatccggatccgcgaggtcgagcagagcctgtcgctggcaggccagatcctcgatgcactcgaggccggcccaatcagggtgccgttgcagattgcgccggagccttgcgagggcatcgcgctcgtcgaaggtttccggggcgacatcctggcatggctccgcctgagcgatggccggatcgaacgatgtcatctgcgcgatccgtcatggtttcaatggcccctgctcgaggcggccatcgaaggcaacatcgtggcggacttcccgctgtgcaacaagtcgttcaactgctcctattcagggcacgacctctgaggaccggacgcgatgcgcaaacttctgcttcagagtctgtttcgccagccattgaccgagcaggcgccgcgtcccgatgacgccgcgatcgcggaactcgcggccacggtcggccgcaccgcaaggcgccgcctcggccgcagcctgtcgatccgcgaggttgatgccggctcgtgcaacggatgcgagctggaaattcacgcgctcagcaatccgtattatgacgtcgagcgatttggaatctggtttgtcgcgtcaccccgtcacgccgatgtcctgctcgtcacgggtccggtgacgaagaacatgcgcgaggcgctggagcgaacctacaatgcaacgcccgatccgaaatgggttgtcgcggcgggcgattgcgccagggacggcggatgctttgctggcagctacgcagtggtgggcggggtttccgcaattgtcccggtcgatctccacattccgggatgccctccgcctccgatgacgatcctgcgtggtcttctcagcttgctcgaggaggtggacgccggcggcgcggcgcgctgagggatcgcgcttttaagcatgatcttctcggaaaaccgctacgcactttttccggatcatgttttagccgctgtcgcgcagcaccagttcgaagccgagatcgacgcggcgttcgccgccgcgctccagcgtcagcgtcgccgccgtgcgcccgatcgcatcgccgtgcacgctgatcgtgctcaatgtcggcgaaatcagctggcccatttcgagatcgccaagcccgatcacggcaaccggctgcgccgatgcgggcccgtcacgcagcaggccggccttgcgcagccctgacatgaagccgatcgcatgcgcatcattggcagcgaacaccgcgtcgacatcgggcaggcgcgcatgcgccgccacgctgccggagtccttgcggtcgaggatcaaccttcgcggctcggcgagaccgcctgccagcgcctcgtccctgaagccgaaccagcgacgcgtgccgcgcggatcgtcgcccccgatgaaggcgagttgcttgcgtccctgcgcgaccagatgcttcgcgacagcgacaccggccttgtaattgtcgaagcccgcgaccgcatcgatcgggttggccggcagatcccaggtctcgacgatcgggatccgtgcgttgcgcagcaggcgggtgccgtcttcggtcgccggcgagccgaccatgatgatcgcctcgggccgccgcgacagcagcgccgccagcatgcggtcctcgcgcgccgcatcgtagcgcgactgcgccaggatcaccgagaagccgagcggctcaagcttgtcggacaggccctgcaccgtgtcggcgaagatcgaattggcgatggtcggcaccagcacgccgaccgaattggtccgcgcgctcgccagcgcgccggccacgaggttcgggacataaccgagatcacgcattgcccgctcgacccgcgcccgggtctcgggggcgaccaggtcgggcatccgcaccacccggctcaccgtgatcgaggacacgccggcgcgcttggccacctcggagagggtgggcgcggcaccggccgggccgggcccgggttcggtcagttcggagctcatggcgggagcctgcacgattccgggttgccaagccatgatgttagcgctagcattgccttatgttagcgctaacatcaatgaaaatgggagaaacggcatgatttcggacgagctggctcaagcctacaagcgcgacggggtgatcgtggtccccgaggtgctcgaccaggagaccctggggcgggtgcgcacggtgctcgcggagctggtggccggcgccgccgcggtgaccgagcacaccgatgtctacgatctcgaaccgggccacacgccggagaccccgcgcgtccgccgcatcaaggcgccgcacaaggtgcacccgatcttcgacgagatcgtccgcagccccgccgtgatctcgatcctgaccaagctgatcggtcccgggctgcgcctgcacggctccaagctcaacatgaagtcggcgcaatacggctcgccggtcgagtggcatcaggactgggcgttctatccgcacaccaatgacgacatcctcgcgatcggcgtgctgctcgacgattgcgatctcgagaatggcccgatgctggtgaccccaggcacgcacaccggcgccacgatgtgggatcaccatggcgaggacggctgcttcgccggcctgatcgatccggaccagatccaggacgacatcaagcgcgcggtgccctgcatgggcaaggccggcagcatgtccttccatcatgtgcgcgcgctgcacggctcggcgaccaacacctcgaaccggccgcgcaacctcttgctctatgaagtcgccgccagtgacgcctggccgctgatgggcgtgaaggatttcgacgagttcaacagccgcctgctggcggggccaccggtggtcgcaccgcggctcaccgacgtgccggtgcggatgccgctgccgccggccaagcggcagggatcaatctacgagacacaatccgcgtcgaagaaatcctacttcacgcgcgccgcctgagactgacgacaacgcccgcggccaggccgcgggcgttgctgctttcaaaccataaaaatcaatacaacggggaaacgaatgaccaagatggcagatggcgccagcacatcgcgcctgcgtgtgattctcgccgcaagcatcggctctgcgctcgaatggtacgacttcttcctctacggcaccgccgccgcgctggtgttcggcgagttgttcttcccgaagagcgatccggtggtcggcacgctgctgtcgttcctgaccttcggcgtcggcttcgtggtgcgaccgttcggcggcctgttgttcggcatcctcggcgaccgctatggccgcaagccggtgctggtcgcaaccctgctgatgatcggcatcggcaccacggcgatcggcttcctgccgacctatgcgcagatcggcgtctgggcgccgatcctgctggtcgcgatgcgcgtcatccagggccttggcgccggcgccgaatatggcggcgcggtgatctatctggttgaaaatgcaccgccgaagcatcggggcttctggggcggcttcgcgccgctcggcgtctccgtcggtaatctgctcgccgccggcgccttcgcgctggtgaccatgctgccgcgcgaggcgctgatgagctggggatggcggctgcccttcctggctagcttcctcctgatcgtggtcggtatcttcgtccgcatgcgcatcaccgagacaccggtctataccgaggcggtggtcaagcgcggcaaggtcgagagcaatcccgcgatggaggccttgcgccagcacccgcgcaacttcttcgtcgtgctcggcgcgcggatggccgagaacgggctcggctatttcttcccggtgttcggcctgagctacgtcatcaccacgctcggcgtgcccaaagcggaggcgctcagcgcgctgatgctggcgttcacggtcgagctgtttgcgatcctcggcttcgcggcattgtctgacaggatcggacggcgtccggtctacatgttcggcgcgctggccggcgtggcgctcgccttcccgttcttctggatggtcggcaccaaggagtggatcatgatcgcgctcgccttcatcctggcgcgcgcggtggtgacggcggcgatgttcgggccgcaggcggcgtatttcgccgaactgttcccgccgcaacgccgcttcgccggcttcgccttcgcgcgcgagctcggctcgctgctgtccggcggcccggcgccgttcgtcgccaccgcgctggtggcggcctacggcacctggtggccggtcgcctgctacgcgatgttcctgtcggcctgtacggtggttgcgatctggatcggaccggagacctatcaggagaacatcgcggccgatgccagcgagcaggccgagctgcccgccgcgatcccggcacgggcctgagcggtggcgcagcagctgcgcgtcctgcaatcgctctgggcgatggagcggcggctggcggatgaggccgaatggccgctgcaaacccagctcgcgatgatccgcgatgccgggtttgacggcgccggcgtccgcttcatcgatccggccttcgcgcgcgaggtgacgggcttcctgcgcgcgcatggcatgatctggcaggcgcaatgctacccgaagtgcgtcgatgacctgaagccggtgctcgagctggtcgccgagctcggcgccgatcacgtcaacctgcagccggacgtccggccgcgccggctcgccgactgcattcccctgctcgaaggctggcgacggcttgccgcggaggccggcgttcccgtgcatgtcgagacccatcgcgaccgcatgacgaccgacctgttcttcatgctcgatctgctcgactgctttcccgatctgcggctgaccgccgacctctcgcactatctggtcggccgcgaattcgcctggccggtcgacgatgtcaatcatgcgatgatgcatcgcattctcgaccatgcctggggcatccacggccggatcgcgagccgcgagcaggtgcagatctcgcttggcttcgcgcagcatcagggctgggtgtcgctgttcatggactggtgggactacggcatccgctcctggcggaagcgcgccgggcccgatgcaaccctgaccttcctgtgcgagctcggtccgccgccctatgccatcaccgggcccgacggcagggaattgtccgaccgatggcaggacgcgctggtcatgaaggacatgatccgcgcgctgtgggagcgcatcgcgaacgagccgccacgcccgccgccgcgttgatttggacgagccgcggccgcatcctgcgacaaccgcaattcggagggacgcgaggggctgtgcgcgaccgcttggcatatccgcttcgacgcctcgcatgcgtcgtcgtcctggcgatcgccgcctgcctcggcacgaaggcgatcgcggcggagccgacgcttgatgtcgccgccatgccgcgcgtcgccacgatcggcccgcgcttccagtcctacaacatcgagatggtcgaggtgaccggcggacggttctggaagccttatgcggccgccgatgcgagtgccaagacggaacaattggcaccgcgcacaccgatcgatctgcgcgatggcaggctgcgcaaactcgccgcagcgctcgctccggcctatcttcgcgtgagcggaacctgggccaacagcacgttctttgccgattccgatacgccgccggccgcaccgccggccggcttcaacggcgtgctgacacggcagcaatggcgagaggtgatcgatttctcgcacgcggtcgacgctcccatcgtcacgtcctttgcgatcagcgccggcacgcgtgacgccggggggcgatggagcgcggaacaggcccggcagcttctcgccttcacgcggtcggccggtggccatatcgccgcagcggaattcatgaacgagcccgatctgccgacgatcggcggcgctcccgcaggctatgacgccgcagcctacggccgcgactttgcagcgttcagtgccttcatgaaggacgcagcgcccgatgtgacgatcctcggtccaggcacgatcggcaccggcgccgatacacgcgcgcgctttgcggtgtcggctgcgggcatcgacgaggtctcctatcatcattacggcgccctctccgcgcgctgctccggcgatcgcaccgcgaagttcgccctgtcggacgcctggctggcacgaaccgggaagacgctcgccttctaccgaacgcttcgcgaccggctcgcatcgggcaaaccgatctggctgaccgagaccgcggaaactgcctgcggtggcaatcgctgggctgcaaccttcaccgatacgttccgctacctcgatcagctcggccgtctcgccagggccggcgttcaagtggtgatgcacaacacgctcgcggcgagcgactacgggctgctcgatgagcgaacccatctgccgcggccgaactactgggccgcgctgctgtggcggcgattgatgggaaccagcgtgctcgatgccggcgtcaccgtgcagcccggcctccacgtctatgcgcattgcgcacgcgacatgccggacggagtagccctgctcgtcatcaacaatgatcggcgttaccagcgcaagctgaccctgtcagccgcctcgcaacgatacacattggcgagcgcaaaccccgcagacggcaccgttcggctcaacgacagcccgctggcgctggcggctttcgaccagatccccgcgctgaatggtgaggttgccgcggccggaccgatcaccttcgcgcccgcgacgatcacgttcctgaccattgccaatgccggcaacaccaattgccgatagcgagccgacgccgccttacgccgcgtcgcggctgtcctcggaggaggctgccgggcgcaccagatggccaagcatgatcgctgtcatcagccgctccatctcaagccatgcagtgacatgcgacatggtcgggcggccgccaatcgcgagctgattgacgtcgtcgaccgccgtcaatccgcgcgggtagaattcacggaagatcacacgttcggccaagccgtcgaccaggcggaagttcagcgtcttcgatagctcgccgagggcttcgccgaccacgcgcttgttgcgcgaaccgatcgtggagagacggttgcgcagcaccacccattcgaatgccggctggtcgttcgcgctgcgctgccgccgcgcctcctccaccattttcgaatagtggctgatgccggtcaccttgaagtcgttcggatcgacggtgccgaggacgtcgaagtcgacgaagctgtcgttcagcggcgtaatcagcgtattcgccagcgcatgcgtgaacgtcgtcagataagtgtcatggccgggacagtcgatgacgacgaagtcgtgcgaccggctgagccgttcgacgatctcggcaagcgcgctgcggccgagcgtctcgacttcgctgctcctgccgctcaccgtctcgaagcacatatgtgccgggatgccgagatcgagcgaggtctctcgcgcccagtcccgccggttatcgacgtaatgcgtcagcgatttctgcttgttgtcgagatcgatggtggcgacgcgctgacccgccttgatcagcgcgacggcgacgtgcatggcaatcgtcgacttgccggagccgcccttgttgtttcctacaacgatgacgcgtgcgtttgtcatgggaatccctaccggacgcttgagccaaagcaggacgaaatcaaatttcatgaatgctttgaatctccctgattcgacgaatctcgacaagagtcgtcgcaacatcaccgtgatcgaaattcgtgcggttgcgacatcattgtcacaaccgcatcgagggcacgtaccgtgaacgcaatgcacgtctcagggactaacgtccctgagacgaaggcgcgatgagaccaggtaggatcgtcatcgcgctttagcgccttgttcgagcatgatctttccggaaaacccgctttgcacttttccggatcatgcttcagcgcccctggaacacggcggcgcggcgttccacgaatgacttgatgccttcggccgcatccgacgtgttgagcacgcgttcgcggatctcggggatgatcgcgatcgccgcctgctcgccggcttcgatgaacttgcggcccgcctctttcgtcacctggattccaagcggcgcattgcgcgcaatgatcccggcaagcgccatcgcacgctccacctgctgacccgctggcacgacctcctgcacgaggccgatccggtgcgcttctgctgcggtgaactcgtcgcacagcaagaggtgatacatcgcatcaccccacccggcgcggctgatgtagcggaaatgcgcaccggccagcggcgcgatgccgcgcttggcctccatctggcagaaccggctgtcatcggcggcgacgacgatatcgccggccagcatcatctcgatgccgacggtgaatacgatgccctgcaccgccgtgacgatcggcttgcggcagcgcttcgacaatccaaagggatcgacgttgccctccggcagcggcttgcgcgatgcggtcgggccaaagaatttcggcatgtcgagacctgcagtgaagctgccgccggcagcacagagcacgccgacccagagaccgtcgtcattgtcgagcagtgtcagcgcgtcggacagctcggccatcatctccgggctgaaggcgttcttcttcgcgggattgtcgatgatgatcttcaggatgtgatcgtgacgctcgtggcggacccgaccctcgctcgcgctgcccgacatctgttgctccctgctttgtgactgactattttctggatgatgcttgtcatccagatgcatgatggtcataatccagaatgagagtcaaacaggggtactgagatgggccattcccaggccgacaaggccaggagccgcgagcggattctgaacgaggccgcaacgcagatccgcgacaaggggctcgacgcgctcagcatcggcagcctgatgcagcaggtgaagctcacccatggcggattctacgggcatttcgcctcgcgttccgacctggtcgccgcggcgctggaacatgcgctgaatgccggtgaagcgtcggcgcatgcagcgcgcgaccccgacaagccggtcagtatcaacacgctggtgcgcagctatctcagccgcgcccatcgcgaccagcccaagtcgggctgcgcgatcggcgcgctgatctccgatgtcggccgcgccgacgcgcaatgccgcgcggtgatggaaccgcacatcgaatccttcatcgccaaggtcgccgagacattcgatgatgatgacgatagccgcgcaatcctggcagtcagtgcgatggtcggcgcgcttgcgatctcgcgcgtgctgaccgactcgaggcgctccgacgccgtgttgcgcacggtgcgcgacggtatcgtggcaatggcatcggacgaatgatcctcccgctacgcgggcagcttgaatggagtgagccatgaacaaccgatccggccttgaaccaattgccgtgcagggcagcgtgctgattgccggcgtcggcgcatccaatggcctcggcgccgcgatcgcgcgccgttttgccgccggcggctatcccgtcgcgatcgccgggcgcaatgccgagaagctcgccgcaaccgccgccgaactcgctgctgatggcgccagggtcacgcatgtggttggcgatgcctccaccgcggccgacgtcgcgcgcttcgtcgaggctgcacaaaagctcgcgccgctcgcgatggccgtgcacaatgcgggctccaaccggccggcgccgtttctcaaggtcagcgagcagcgtttcgaggagcactggcgcgagcacgcgctcggcggtttccagctcgctcaggccgcgatccccgcgctgctcgcgcgcggcggcggcacgctggtgttcaccggcgccagcggctcgctgcgcggcaaagccaattattcgcccttcgccgccgccaaggcggcgctgcgcgcgctggcgcagagcgttgcgcgggaattcgggccacagggcattcatgtcggccacgtcgtggtcgacggcggcatcgagggggatcgcctgctgagcctgcgtccgcagttgaaggacgatcgcggaccggacgggctgctcaacatcgctgcgatcgccgacgcctattgggtgctgcatcaccagcatcgcagcgcctggacgctggagcttgatctgcggccgtgggcggagcagttctgagcgcccgtggcggcacgccttcacccgggaaaatcgattgcgatcggcgcaaatcttgtcaggctatgcgacaaggtccgttcgagatcgcaacctgtcccgggagaaggccatgtcgcagcccacgccgatcctgcatcatttcgaccagtcgccgttctccgagaagatccgcgtcatcttcggattcaagcagctcgcctggaactcggtgcggatttcccggatcatgccgcggccggacctgatgccgatgaccggcggctaccgccgcacgccgacgatgcagatcggtgccgacatctattgcgacacccagatcatcatccgcgaactggagcggcgctttccaacgccgacgctgtttccggcaggccatgccgggatgccctgggcgctcggcatgtggaccgaccggccattcttccagagcacggtgaacctcgtattcggcttcatcggcgacaaggtcccgcaggattttatcgcggaccgcgagaagctgcgtggcggcaagttcgacattgccgccatgaccgcggcgctgccacagatgcgcgaccagttccgcgccaatgtcgactggatcgaggcgcaactcggtgacaacaggccgtttcttttcggcgagttcagcctcgccgacgtcagcgcctacatgaacgtgtggtacgcgcggcagagcctcgccacgatggacgagatgatgaaatcctggccccgcattgcggcctgggagcaacgcatccgcgccatcggccacggcacgcgcaccgagatgtcgtcgggcgacgcgctcgagatcgcggcgaaggcgcggccggagtcgcccgtcttcggcgaccctgccgatccgaacggccgcaaaccgggcgacatcgtcagcgtgatgccggatgactacggcaaggtcccggtccgcggcgagatcgtctcgctgtcggcccagcacatcgcgatccgccggtccgacgaacgcgccggcgcggtcgtggtgcatttcccgcgcgccggcttcctggtcgttccgggctgatcagccagcggcgccccgcgacctggaaacgctgcgtttcgcgacgtgaccttgtcgggccgcgaaccggtaatatttccgtcccatctccaactgaaggctccacagcgcgggcttgcggacatctcagcaagcaacacgacctctcggcctgcgtgcgatgggtggcccgtggcggatgctccgccacgccgacaaactggactatgtgatgacgacctccctcgaatttgggctcgatacgttcggcgacgtcaccaacgacgccggcggggcgccgctggcccacgcccaggtgatccgcaacgtcgtcgacgaagcggtgctggccgatcagctcggaatcgatttcatcgggctcggcgagcaccaccgggccgattttgcgatctcctcgcccgagaccgtgctggcggccatcgccgcgcgcacggagaatatccgcctcggctcggcggtgaccgtgctgagctcggacgatccgatccgcgtgttccagcgcttcgcaaccgtcgatgcggtctcgaacggccgtgccgaggtgatcctcggccgcggctccttcaccgaatcgttcccgctgttcggcttcgacctcaggcaatacaacgagctgttcgaggagaagctcgacctgttcaccgagctcctgaagcaggaaccggtgacctggcagggcaagctgcggccgccgctcaaggaccagtcggtctatccgccggtcgagcgcggccggctgaagacctggatcggcgtgggcggcagccccgaatcggtggtgcgcgcagcgcattacgacctgccgctgatgctcgccatcatcggcggcgatcccaagcgcttcgcgccctatgtcgatctgcaccagcgcgcctaccagcagttcggccggacgccgcagccgatcggcgtgcattcaccgggctatgtcgccgagaccgacgcgcaggcccgcgaagagctgtggccgcactacaaggtgatgcgtgaccggatcggcaaggagcgcggctggccgccgatgggccgcgacgagttcgtcgccgaggccgagcacggctcgctctatgtcggagcgccggaaaccgtcgcgcgcaagatcgcggcgaccgtgaaggcgctcggtgccgcgcgcttccagctgaaatattcggcgggcccgctgccgcatgagaagctgatgaagagcatcgagctctatggaagcaaggtggtgccgatggtgcgcgacatgctcgccgcgtgacacctgcgagccgcccacacaaagcaagacccccggcgttctagcgccggggcgcattacagacaggcccgcgatgcctggctggccgaaacaatcgaatcaacctcaatcttggttcagaggttgggtctcgcggcgtgatacgtgaacgggtccgccgcccatcctcgaccatgtcgctccagccagccctctgccaccaactttcggcacgttggattgacgcgctgtatggagcctccgtcgccgaagatacgctcggcaatctggcgttcggtcagacccggctgttcgcgaataagccgaattatttgttgagctaccgtcatcggtcgccaaaaacgatccatcggtggatcggtactgattaatgaaccaaatatgacatcgtacgaaaaaatggcgctcttgtgagagcagccgcattgcccgaacaaagcaaaacccccggcgttttggcgccgggggctctgttagctggctatcagatcaaccggtattaccagttgcgctgagcgcggagcagcagggtcacagtattctggtccttcaactcgtagagagcagcaggcttgccgatcgcggcgctgggcgccgccaccgtaccagcatacttctgatccagatgggtgtaggtcaggtctgccgtgaaggtcaggttcttgaccggggtccactgggtctgggtgccaatctgcgcgatattgtagtcggggttgcaggtggtgatcgcgccgcccagagcattgagggtggtccgaaccgaaccgcccacgccgccgacgccgcagagcagggtcttagccgtatcgttgtaggtgataccggcataagcaccgtagatcgaggtgttccagtaggggctccagttgtgcacgtatgcaccgcggaagccccaggtcgtgaccagctgctgcccggtgttcacgccaccgatagcaccgaacacgctgtccggcgcaacgccgataccaacgctctggtaggcgcccggcagaccggttccaccataaatggtgttcgcaccagccgaaccagcgaggtcctggatgttgtagcgcgtcgcaccgttggtgtagacgccctgcacgttgatcgtgtcgccaggtccggtcggaatgttcttgatcgacaaggccagctgaccagcccagccccacttgtcgtccggatgaccggtcaactcagtgccgccgtagtaggccgcgtggttgttatgcgccgcgaacgacgcctggaacagaccccaagcctggtcgacgcgcagcatcgcgacgaggtccggagcaatcgtgccggcgtaatcgctggtgccgtaagcgccacccgcgaggatgttgttcacgccagcctggtagtaggcggtctggtcctgagccgacagagacagcgacacgccgttgccgaactgagcggtgtaggtgaactggttcacgccagtgatagtaccgccgccgccgacgaggccgtcgaagttgttgcccggatagttggcccacggagccgagaactgcgagactgccttacccatcgtgaagccggcgaactggatgaaggcgtagtagacgccaaccgtaccgcctgcaaccgcaccggagttcgcgttgttcggggcctgaaccgcgccgatcggggagtaaacggtcgcaccgttgccctggccggcgtaggtatccgaagtccacgagaacgtcgcatcgaagaaggtacggacgacaccgtattcggtcgcagtacgcgtatcgatgttcaggtcttcacgagagcgccaggtgtagccgttggtgaaccggttgtttgcaccgccggcacccgaggtgttgccggtgtgatccgagttcgagttcacgacgacgtcggcgcgcaggtagccgcccagcttgatacaggtgtcggtgcccgggatgtaatagaaaccgggaccatacagggagcaaaccttcacgtactcgaccgctttggccttgacgggaagatcggccgcctgagctccgccgaccgcgacgagtgccgccgccgagccgaggataaggctcttaaccatcttcatgttaaacctccaagttgctctatctcagggaaggttccggatccgccgggtaaaacaccctcaggttggttccctttgtcccttaaatccccgctcagtcgcttcgcgccttcggacacacccgcatgaacgcgagggacttaagcgaaccacctagaacgggacgaccttgggatgcccccctccgtcgcagttccatatgagacagaaggcccccgatcacgcaacaaaagaccgctcgccttggcaggagttgcggctgtttttgggcaaatgttgcacaaatatcacgggcttttgaactgcggcatttcagcaagtcattgaaaaatatacataatatttggagttaccgctagcgggcacaaattgggcaacaccgggcggaacggtgtgcaaaacgcgtagtcctacggagaaggcgaaaatcggagcccgttttggcggcactgattccggccacgggcagactgtttcagtccaaaaaaaccgctatctgtagaacatagcccgcccaaaataccgtcgactcgcgcctggaagggggctttccgatcggctcggagcaggcacgaagacggcggacggaccgcttgttgtctgcattagcggcgctacatgtcaccgcgatgtcagtccgcagatcagtcgattcgttctccgcagcagccacgcgatgaaatatctccactgcatgcgtgaagcagtcacaaggcgcgacgccgtgagatgacgccgccgacgaacgccgtcgcagtcactcgtccaggatatccagcagatcgttgatccgctcgaacggcggctcttgcgtccggcccgagtagaagacgcgatcgccgtcacgttgtagcgatcgcgctctggatttaggcaaccgcccaggcaggaacgtcgctgcgacggcctccggtccgacgtcgagcctgacgatgccgcgccgcttgcaatcgatcctcagtcttgccgccgcgaagaagtcgcgccccgccggcggcagcctgccgaagcggcgagaggtctcttcctcgagatcttccagatcgtcctcgttccggcacctcgcgacgcggccatagatttcgaggcgcatcgattccgactgcacgtaactcctcggcaagagatccgcgaccggaatattgaggtccggcacccacagatcgccggaccgatcgctggccttctccgaagcctgcttcagaaggtggctgtacagcaccggtccgaacacctgcacgtggccggactgccgctcggacaacaaatctccggcacccctgaggtccagatcacgctcgctgatcgcaaagccggcacccggcctgctgaactcctccagaaccgccagacgcttgccggactgctccgagctcgattcagtcagcatgtacgcgaaggcgcgcgttccgccgcgccccacccgtcccctcagctggtgcagctgcgcgaggccaaacttttccggccagcagaccacgatggtgttcgcccggggaatgtcgagaccgctctccacgatattggtcgccagcagaacgtcggcctcaccttcgacaaagctcatcatgcggtcgtcaagctcgtcggcggggagcttgccatgcaggcaaacgatgcggagctccggggcgaccgcctgcacgcgcgccagcagcggatcgagatcctggatgcgcggacagatcaggaagctctgcccgtgacgccgctgctcgcgcagcaatgccgcggcaatggccgcgtccgacaacggcgcgatcctggtcacgattggaagccgatgcacaggcggggatgcgatcacgctcagatccctgaagcccgcaagacccgccgccagcgtgcgcgggatcggcgtcgcgctcatccagagcgtatggacgcccttcgcgagccccgagagcttcgccttctccgcggccccgaagtgctgctcctcgtcgacgatgaccaggctgagcttggcgaatttcacgtccttcgaggcgatcgcctgcgtgccgaccacgaccttcatcttgccgcttcgcaggccttccttggtctctcgcatttcctgcgctgacgtcgcgcgtgacaggcttcccacctcgatgccgaacggtgcaaagcgcttgcggaacgttgcgacgtgctgccttgccagaacggtggtcggcacgacgatggcaacctgcttgcccgacagggcaacggccgccgccgcgcgcaaggccacctcggtcttgccaaaaccgacgtcgccgcagacgacccggtccatcggatgacccgacgcaagatcgtcgagcacatcgcggatcgccttcgcctggtcgacggtcgtgaaatacggaaagcgcgcgacgaaccgttcgtaggcgggaccgggagcgaccagcttcggagcgcgccggcgccgccgctgcgcgatgtgcttggcgagcgccttggcggcgatctggatttcctgctccgccctggtgcgccgcgcccaccacgtgctgccatccgcccggtccaatgtcagcctgccgagctccgccgcatagggccagatcagcgcgaggtcagcgggcggaacgagcgcggcatcatcgcccgcaaatgccagcctgatcatctcgcgggatgatcccttgcccatgtcgagggcctgcaagccatcgagcacggcgagcccccgctgcagatgaaccacgaccgcgccccgctccggcacgtcgggatgatcgaacgccgcactccaggctctggccatcggctgcggatgatgggcccggctgccgagcacgtcggtcgccgtcacgacgacaagcggcttgcggcccgaaccgatgaagccggtgtcgaagtccgccagcagcgctgcttcgccgccccgtccgttcgccgcctcgtcccagtcggtgaagcgctccgccttgatcccgcccatccgctccatcgcgcgcaggtcgtcctcaaccgccgcaaccagcagcagccgcgatccggcgcgctccgtgtcggcgacaaaggcgcggagcgccttccgcgacgaggcgaccttggagaaatcaggcgtcggagtgaacgccgcctttcgcggcagcacgctcatgcgtttggtcagccgcttccagtcagcaggcgcaaaatactcgcgctcggtctccctgcggccggctgcctccttgatcgtgctgagccagctatcggcgtgaccggacacgcccgcgtccgcgatccagcgtgcgcgctcacaataatccggcagcaccgcccgctgcgcccgcttgccgccgagcgcgatccgttccgacatcggatcgatcagcagctcctgcgtgtcgaagacgacgtcgtgctcgttgggatcgacgcgggcgatcctgcggatcacgtcgccggaatgctcgatcctgaacggcccgaggccgccggccggaaacacttcgaacgtcatgccgtggaacagaacgctcccgggataatccgcctcttcgtcgagatcgtatccgagcgcctccaggcgatccttgagatcctgctcggaatggcgcgcgccgaccttcaagctgatgctgaggcggccccagctcgcgggcaacggcagccgctccatgaccgcctccgcggtcgacaccaggaagacgggcttcttgcgcttcgcaagacgccgcaacaccgaactgcgccggccggcgatctcgcgcgacggctccagcccgtcgaacggcaaggtattcagccgcgggaataccagcacctcgagcgaagcatcgagcgaatgcaacacgctgccgaggcgctcggccctgttctcgctctctgcaaggaaaacgacgccgtcgcggccggactgcttccattgctcgcggaggtgcagcgccaacatgccgaggggcgaggaagatgatatcccggaacgcgccgctcccttgctgttcttcgtcgcgccagcagcagcgcgggccttcttggtattcgccacgtcaaatccatcgttatttcgtgagagcgatcgcctggtgacaagcgaccgcaggccgccggcgccccccgacgcacgcaggccgcgccctcattacagtctcgcacgcgcgttggatagccgcgggttggggatcaattgcggcaacggggatcgtctcgcgcggtgccgtcagctcctttgtcatccggcccccacatcaggtcgcggcgcttgcgctttgctccggtgagacgccacttgtccgagaactccactcgtctgaaaaatcaccacgagctcctgcgcatcgcaccaattcagattgtctaaggggtgtgagccacatcggcgccgaagccgacacacgccgcgcagggctgttcaccttgggcggcgaacagcttcgattgtcttgagacgttcctgcaaggtcttcttcatcgccgtcccattcactgccatcgaacaagacgttctggacatcacgaggccgtcaggcggtcacgcggcgcttctgtgtcacgcaacaaaaacagggaaggttatcatgaagacgaaatcgttcgccgaacgcgtgctgggcacgacctcgctggtcgtgttgtcggccgccgccatgatcggagcccagcaaccggctgcggcccaaaccggcatctacggtggcggcagcacgctgtcgtcgctggcgctgcggcagatcttcgactgctatgcgggcgcgacgctggccaatgacggccaggcattctcgccgagcttctcgaccgcgacgccgagcccgaacctgctgccgaccagctgcaccttgttctcgacctcgatcgagggattgttcgccgccgtcggctccggcaacggccagcgcgcctacatcgccgacgatgcgcagcaattgttccgcggcagcccggcctccgcgccggccgtggtgcgcaagccctcggccaagccggcgttccgcgacaccgccaattcggccttcaagagctatccctatccgcggctcgacttcgccgccagcgacgcgccgctcgccagctcgattgcaagcctgaccacgatctcgttcagcaatttcatcccgtcgaccaattggcagaacacgttgctgatcggcgccctgagcagcacggccgccagcttcaatccgtcagccgtcggcgcgccgatccaggtgccggccatggaggtcccggttgcgattgcggtcaacacgtcgaactccgcttcgggcgtgacctggaccaaccagtcggcgctgtcgccgaacaaccaggccggcggagcgatccagctctccgccgcgcagctctgcgcgatcttctcggcgaccgtgacggactggcacgacacctcgacgctgatccccgcgctcgacgcccacggcgtgcagcaattccagcacttttacgacgccaacaccaacggttcgctgaccccggtcgcctataccagcggccggctgccgatcaaggtggtctaccgcgtggatgatgccggcgcgagcttcatcctgaccaactacctcgccaacctctgcccgctactcgacccgaccggcacctataactacaagaagatcttcaccggcgtcggcgtcggcggcagcaccacggcgaacctgccgtccggcaagttctcccgcctgctcgacaacatcagggcggtgagcagctccgaccagagcgacccgttcgacgtggacgacgatgaggaacgtccggatccgcattggatcagcgcgtcgggcagcaaccacgaagcgctgaagatcgggaccgatccgcgcttcgccggccgcatcggctatctcagcgccgacttcacccagccctatgcgcagaccgtgaccgaggaaatcgccggcaccacgatctccgcggcggcaccgctgtcggccagcgtccagaacgaacggcagcgcctgctcggcgtctatcaccccggtcagaccggcagcaatggcagggcgcaaaacttcgtccggccgacgccgaacaatgcccagctggcgttttccaacctgaccgcgccgagcgtcaacagcagctatgatgcctggaacctgtatgcccaggtctatcccgccggcaccgtcgtcggcggcgtgacctatgacggcctgtccgtcatcggcatcccgctgcagacgcagagcgactatccgatcaccggcgcgagcttcctcaacgtgtatagctgctacagcgacacggccgggacgcgggtgcctgctgtgaagaactggctcgcctggtacttcggcggatcgatcaccgggctgccgaactacaatccggcgacctcgaactccgacaatcccggctatgatccgaacgtcgcccgggtgatccgcaacaacggcttccacgaactcgacggcctgtgggccaccaacatcctgaacgcctatctgacatcgagcgcggccggcggcctgccgaccgcgatcgcggcctacagcacgtcgggcacgcaaaccgacggctgcgccggcgtcaccggcggcgcgaactgacgccgacatcggatcgtgatccgggacgatccggatcacgatcttcaagacttcagcagccgggctctcgatcgaggcccggctgtttcgttgccatatcagccggccgtggcggcggcgcgctgcgcggcgaccagctcgaaatagcggcttccggcctgggggatgatcgcatcgcgattgagcagatgctggatgcagatcgccgcgagatcgtaggagccgtagcagtgatgggcgacgagggcgagatgcttgagctgctcggagctcatcgcgtcggccttggtgaaatcgcggacatagacggcgtcggcctcgagcagctggttgaacgcctcataggcattgacgccgcgcatcggccagatcatccgcttgttgatcgccagcagggcatgggggatgaagccctggctgcgcagctcgaggtcgatctcgccgaacaccggctgcttcttgtacagcggcagaaacgagacctcggtctggatcacgaccgcttccgcgagccgccgccgtccgttctggaaaaccgcgagctccgagccctgcacgtcgatcttgagataatccatcgcatcgatctcgccgatatcgtcgagccgatgcgtcgcgatcctgctgtcggcgatgatgcgggcccattcgttgaagccctggaagtgcttcagcatgactgggtcgggctccagcaggctggtcatcccgggtgcggcacagacgcggaggcgggcctgctcgccgctgccgacgacatgaggcagataagtctcgagctcgctcttgtgggcattcaactcggccagcgcgctcggttgcggctcgaagccgaacagccggcacaggcgtttctgcagcagcggcagatagggcgggacgtcgatcgggttggcgccgatatcgaccacagcggtaagccgttcggctgcaagcagcgtgctcagcgggtcggtctcggaaacgggaagcgatggcgcggacgcggttgacggggatgacatcatgagacctcacggagcgttgcaaggcgcgtcgaaccttgcggtcgaagcgcaaagctcaatccccgtcattgcgagccacccggtcggcgcgaagcgccgccggatgacaggctccgcgaagcaatccatccgtccacacgcgcggaaccatgggttgcttcgtcgcttcgctcctcgcaatgacgaggttgcatgcattcactggccttcaccgtgaggccaacgacaggctacggctgctgccggcggtgctcgtcgtcgctgccgttctgcttctggctgtcgccactgccgctgctaccggccggcgtcgcgtcgtcgccaccgccgccatagcccagcacctcgacgatcacgaccgaaggctggtcgttgggcttgttctgcgccggctggccggactgctgggtcgccgccgccgcgttgttggtgactccggccagcgccgtgttcgcggatggtggggctgtgagccctgtctccgtgccggtggcctgcgcgttgtacccgttctggacgaccggcgccacgaaaatgagatcatgaccgcgaacgcccgccgcgccgagatcgatggtgccgcggggcgcgaccagggtgacgttgctcttggtcggatcctgtccgggcagcgtgaccagcgcggcgatgccggcgccggtgaccagcccctgcggattgatgtaacaatagccgccgagggtgcagatctcgccgagcgcagggctcgagacataggtcttcggtcccgcgccggcgctgatgtcgccattggcggtgaacaggccgatgtcaccaccctgctgggtcatgatgcggctctggttgaccaggatcgaggcgtcggcgaaggcacggatggcgccgccgccgagggtcagaatgccttcctggcttgggctcaaggtatcgagcgaggaatggccgacggtgatgccgccgcccggcccgaggatgttgacgtcgccgcccatctgggtctccagcacggaggccgcgacattgaacctgccggtcgcgatcttcggcgcggccttgccggcgacgctcaggctgttgtcggtgtagccgtagccggccgggaacagcgtggagatcgccgtataggctcgggcgttctggccgaaataagggctatccggattcttgaagtccttgcctacctggatcaggaaatcgaggaaggcgcggttgacgagcagctgctgccgcgcctgcggcaggcccttgaaagtggcccaggcctgatcgcgcggctggccgagcacggcggcgatatcggtgaggaagtcgataccgccggtgccggcctgcgccggatcgacgtagttggcgatcgccgcggcatagttgatgccgggcttcacgccgaacagcagatcgagctcggctcccttggacggcaaataaggcttgagaggattattgggaagagcactagcgaatgcgccgccggccgcgctgccgttgccgatcgtcgcgatgccgcgtgtcgacgagtcggacggcgagaacggacctagatcatgcccggcctccagcacgaaggtgccggggccgtagaggagataggagccgccgaccagatcgttgccggcgacgatgctggtgatatcggtcgcattgttgttctggccgaggaaattaaggctgttgccgcccagcggtgtgccattgctggtcgtcgagacgccgccgcccggggcccgccccgcgtagatgttgtggccggcctcgatccgcgccggcttgatcagggtcacgctggcggcaagagtgctgacgggatcaacgccatagatatccttgccggccgcgatgacggccggcacgggatcgttggcatgcagcgcctgggtcagcgtgggccacggagttccgaggagattgatagagttaccggccaagttgacgaaggtgtcatttgagccgatatatcgcgtgaagcggctatcgatatctagcatcgcgaggccggctccgaggctaattgaaccggctgcgacaagattgatcgtgcccgtgttgctcggcagcagattgctgacgtccgttttgctgagggtcagatttccgttaagtgctatcagatcgaacgtggcgggaagcagcagaccgacggtcgcagggtctgcctgaccgccgatctgaacaccgcccgcgttgtgcacaaaaagtcctgggatcgaattcaccgacacagtcgggcctgtcacatcgccggtgaggctcgtcagcgaaacgccgctgcctgggccatagctagtgaaatagttgctccaagcggcgttgccattgctccgagcatccggcgatgctccaggcaaaaatcgcgtcgggtcggcttggatcccaagattgactggcaatgcggcgggatcgtagacgttgccgagcgtcaccgaacctcgcgcggccaaactgatgaagccgtcctgcaccgccagcaacaagggcagcgggtaggtgccggcgacggagttcgcggcgagtgtaactccgagcgtcggcaggccctggttcaacggattgctgctggtggcctggactgagccacccacccggatcaggccggcaccgcggccaaccaggaaatcgctgctcaggaggttgccgccggcggttacgctgagattgccaccgccgaaataggtgatctttggcggattggccgaggtaaaaccgccgccgaccacgagcgtctccggcaacgacgcgccgacatcgatgatatcggcgcccgccgaaagcgcgatgttgccgccgcccagcgcgccgaagccttggaagaaggtggcgtaattgacccaagccgccgtctggcaggcaacagagcccgaggccgcgcatgccgcgaacggcgtcgacgtgccgtttgagaggccgtaatggacataccagtcgctccacatctggccggccggcccgccctgcacgccgaaccggctgccgttggaatcgatcggcatctcgatgccgatgatcgagccgccagcgctgatggtgactgccccgccgcccgttgcccaagtcggcgtgctgacaagcccgttcggattgaaaccgtaaccgatagatagcgtcggtgcattgaaatctgcgggcgtggccgtggcggcgcccgccgtgtagaccgcgcccggagccacctggtcgcgcagttcgacattgccggccgcagcgatggtgatggagccggtgcccgtgcgcacgaccgtcggaatgtagatggtgccggcacctgcaaggtttggctcggtgttcagataggaggtgtggccatcgatggtgaccttgcccgtcaccgtcggcggcaacgacgacaaggcggtcaccgcgttgggatcaaccgatggcgtattgccgatgaaagccgcgccggcaacgatatcgtaggagaagctccccttgccgctcaccgccgccgacatcaattgcgacgccgcggtggtgttgaagacgacgatggggtttccaccaggcgggttgtagatcgtcggattgttcgcgatccggtcggcgggaggtgtcggatctcccgaaggcgcgtatgtcccctgcagggtggtataggccggcggcgccgccggcggcgtcaccgcgatagccgcaaggattccgtcggcgacgtcgattccggccgcatggtccagggctcccagcaaattcggttggctgacgaaattgttcaacttgcccttattgttgttcaccagattggtattgatgacgctgaggaagtatgccgtccacttagtggcatagtcctgcgccccggtgaccacgttgccggtccccgaattgtacaacaactttccgatgccgttggtcagattgtaatattgtgtccttgtggttggtgccgccgggatcgcgttgattgacggcttcacgtgattgtcagacagcgtgttggtgtacgccacgaagtctgcgtaggacagcacgatgccgccgcgcgccgaaacgcccgtcatcgatgcgttgatcccattgacgttgaccccgaccagctcggtctcgtaggcgcggaacatcctcaggtactgggaatagtacagattgtactgatcgatcaccgccggattgctggagcttatgacagtcggctgcaccagcttgaactgcagtgcgagcgcgttataggcggcagccgacagaccgaagaacgcggcgctgggcgaggccgtgggcgatgacgggcccgaccacgagccgttggtcttcaccagatagtcgacgatgccgcttgaattgtactgcaggacgccgttctggaacatgccgagataggagctgtagaggctcgaattgatctcgctggcgtagagcgcggacgcgtccccgccgcgcggcgtgtagttgacgaagaagccgtcggtcaccgtcgcgttgatgttgacgttgttcttcgcctgcagaaccagcgatccgggctcgccgccggtcgcggtgcggtacaccagcgagacatggccggacgcgtcgacgctgcccgcgcccagattccagttgctggcgaccgtgatgttgccgttgttgatgttgaggctcggattgatcagatcgatctccggccgcgcgtgcatgttggcgaagctcgcgctgccgcccgccggcgtcacggccaggttctggacgaagcccgccagcgtgttctgatagaagctgacgtgatcggcattcggcgccgagacgatgaataccgtaccggtcgcctgcggcgtcggcgcgacgatcgtcttgccgttctgatcggtgcccggcagcggattgccggcggcgtcgaaccatccggccggatcgatgatgccgtcaaagtgccgtgcaccggtcgagctgtcggtggtgctccacaccgcgtagggattgagcacgacacccttgccgatcgggttgccgttggcatcgagcacgccgcggacggtgccgcggaaatcgacattgacggtgttgttggtgaggatcggcgcccggatgatgaccgcaccgccggagttgttgatgttcggcccgcccgggccaccgctgacgtcgaatatggcccccggggcgacgctgatcgcgcccgaggtcgtcatgttctggtagccataggtggcgttgacggcgccgccggcgtcgggcgtgccggtggtgcccagcgtgatggtaccgccggtctgcaccaggctggccgtggcgtaggccgggtcggatggattgcctgcggcgtaggacgcattgaggacggcgctgctgccgatactgacgccgccggtggtgacgccgcccgcggtgacgccggcgccatagagcgagatctggccgccgctcggcccgctcgcatcgatggtgccgttgacgatcacgctgccgttgttggcaaccagcaggaccttgccggagctgagcgtctggccggcatcgatgcggatgtcgccattgccgaggcgcaccgtgaagccgccggagaatgccgagagcggcaggccggtcgctccattgagggttcccgcctgcagcgtgaaattgccgccgagatccttgaacgcagcgctaccgtcgagggtgccgttgagcgtcgcgctgtttgcagccaggatcgacaccgatccggcaaagccgcggcctgccccggcaacactgacggtggcaccctgcccgacaatcacattgccggtcgtcgacgcgagttgcacgtcgccgccgggtgcatcctggaccacgtcgaggatcgcaatgcgcgagccggacgcattgatgagcgcgccgctacccagcacgacgtcgccggcggtcgcggtcaggctgaccttgccggacagcgcctggatcgtcgcgctatcggtgatcgacccgccggcgatggcgagagcgccgccgatattgctggcgacactcgccggcttgttacctgcggcggtgagcaggctgacattgcccagcgtgctcagcgattgcgtcgccccgctgttgaccacgatcgccggggcggacagcaccatgttcgcggcgcccgcgccaccgcccgagaacgtcacggtcggcaggctcgaatagccggtgccggcattggtcagcgccagtccggtgacggcgccgccggacacggtggcggtcgccgtcgtgccggttccgctgatcttgatggtcggagtgctcaggtaaccgtcacccgcattggtcaggttgattcccgtcacattgacgagaacctgcgccgccgtggccacgcctccgccgccggagaaggagaaggtgggcatgctggtgtagccggtgcccggattggtgatggtcacgccgaccacgcccagcgccgcggtcaactgggcgctgccatcccccgtggcgctgttgacggagatggagtcgacagaaccggggaagccggagccggacgaggtgagcttgacgccggtgaccgcaccgttggcatcgacgatggcggtcccggtcgccgtgaccgggttgccgttactgtcggttccggagaccgtgaccggatcgccgttgctgtagcccgaaccgccactgacgacggcgaagctgaccacgccgagcaacgcggtgccctgggcgccggatcctccgccgcccgagatggtcacggtcgggactccggtatagccggtgccggggttcgagatcgtgacgccgccgacattgaacgccagcgccgcagccgcaatcgatccggtatcgagtgtgccgttgccgctgaacgcgatcgccttgccggcgttgaaattgatctggctgaagccgccgagatgcttggcgccgacgtcctcggtgatgacctgcgacgcattgagcgtgagggtgccgccggcgccggtgatgccgaccccggtcgcgccactggtgttggcgagatcgatgttggtggcgttgaccgtggtgttgccaccctggctgaagagcccggcgccatcgaaggtcagcgtgccgatcggatgcgcagcatcgccgatctgcaatccgttggcgtcgtacagattgatcgcggtcgcgctgcgcagccggaccgagacggcatcgttgaaattcgcgaggatggtagaattcaacacaatgccggtgctgccgccgccgatgttgatgaccgatccggcgatgtcgtaattcctggcattcaggatggcgtcggaggcgagcgtgccgctgccgctggtgtcgagcgtcagcgcattgccgccatcgatgatcgcgccggcgccgatcgagaaggcgcccagcggaaccttgctgctcggcggcggaccgctgccggcatattgcccgggaacatagattcggctgaccgtcaccgtgtcgccattcgaaacccgcagcagcgcaccgtcgccgctggcaaacacatagctgccatcggactgtttgaccggcagcgagccgatcgtgatgttacggtcggtgccgccgggcaccgcgccgaccgccctgacgacgctgccgtcaccgatgacaaggcccctgccggtgacaagagctccgtcgccggcgagcgagacaagaagcagctcgggcccggtcaacggatgcgccgcgtcggtcaggacctcgagattgagcgcgctggcggtgatgttctgcacgccgttgatgacttgagcggtgccgccgatcagcaccgaggacgccccgagcccgctgatctggtcggcatcgagaacgaggtagttgttcgcgtccgtgcagccggcggcgcttcctccaacgcagtcgccggccggcaccgctctgtcggaagcgaggaccaggatgttcttgccgctgatctgcacctggccaccgccgccgacgaggcctggcgccagatcgctggtgccgggcgcaaaccggttggtgccggcaagattgagcgaattggttgcgccgagcaccagcacgccgccatcgatcggcagcggcggcggagcatttcctgccgcaagcgcctggttgcggaagtaggttgttcccgaggtaatgtcgatgcgcgaatactgcgaccagaccgattgcgactgcagctggaatacggcggattgcgacgaacgcgcgccggtcaattgattgccgaacgtgccggtgacatatcgcgagccgtccgagctcgaggtaccggcgaccgcattcggattgacgttgtttgcaacctggacgacgcggtaggcgccgggcagcgttgcgtacattcccggcagcagcgtgtaggtgccggcagggatgccgctgccggcaccgatggtcaccgactggcccggcgcgatcccattcgcgaacggctgcacgcttcccgcaggggcgccattcgtactgttgccggctggtaccaccaggccggaagagtatggcgcgaaggcgaagttgggatcgtaggcggcaacgccggccgagtaggtcgggaccagcgcatagatctggcgaccgtcagcataggtcggtatggcgctgccattcgcagggttctgctggtaagtcgtcagcacgttgcggctgccgccggtgcctgcgacaaactccgtcgcatagatatcgccgccgccgctgaggtcgagcaaggcgcccgactgggtcgccacgttcgtaccgaacaggtcgatcgacttgctcggcggcgcggccagcactggcacgccctgattggtagaagcgccctgataccaggtggtgccgtcgacggtgtagccatccggcacgaccagaccggctgccgacacggaggtcaggctgcccgctgccagcgtcacgctcgccgtcggcgtgaaggtccccgaggcgaaggtgacgtgcccctcgttggcaatcgcgttgatgaattgggccgggacgtcgctgctggtccgcacgcccaggatgatgttgccgagcggcgcccacagcgtgccgccctgcacgatgttctgtgcactgatcacaatgcttccgcccgccgaaagcggcggcgtcggaatgccgttctgtgcgatcgtgatcgcgcccgacgcgccggtcgacatcaggaggaacgcggtgttgctgaccgggtagatctcggccgcgcgcagcgtgagattgccgggaaccagcagcgctccaccgaacgtcgtctctcccgcgccaaagctgccgtcgacgaaaccataatattgcggcagcaaccggatggcgcccgcgctggtgaggttgacgctgccggcgttgtcgagcccgatgccgcgctcgaggtcgatccattgagccgtcacgttcaacgtgccggcgccggcagtcgggacgatcgactgggcactgggcacgagtccgaccaagcgaacgtagccggcgttcagattgacgaccgacccgtccgcgatcgcgatgtgtccggcacgcgcgttaagggtcagggcgccgggaatcctgacattgaccgagccgccgaacgcaatggtttgagcattgagcgtcacggaatcgaagccgctgttgctcagcgtatcggccccgatgaatgcacccgctgtcgccgacgcgcccaaagccggcaggttcgctgcgaccacgccgggctgctgcaccgtgatgatgtccggcgccggcggagcgcccttcgcggtgtcattgacgacgccgatggtcaggctgccgccggtcgcaagcggtgctccgcccgccgcatcgacggacccggcaaaatagaccgtcctgccggacagctgcagactgccgccgttgctccaggccgcctgcccgacgacgtgcggtccgaaaccagcctgcggcaactggatcaggttgctttccgcggtcaccgccgcaccctgcagattgaactgcgcgccgggctccgccaccacgctggtcgccaacagcgagatggtgccggcgtcgcgcactgtgcccgtcgaataggcggtcacctgcggattgggcacgaacacgccgctcacatcgagcacggcggtcgcaccgatgcgcacctccgtacccgttgcattgatgctgcccgctggcacgacgatgttgccgcgaatagcggccgtcgcaaccgcattcagtgcgaccgtggccagcggatcggtgacgatggcggcgccacgatcgaccagcacattagtcccgcccagcgtcaggctgaccggtttgcgcaagccatcgggcaccagtcccagggacgcgaagtcgcgcacccgcgcgccggtcggaatcttcacctcgcggccggagagcacggcgctcggctgcttctgcagcagcagctgcgtgcccgcggtcacggtgaccccgccagaaatatcggtcagggtgtactgggagaatccgccgctggtgaagaacgaaggcggcagaaccacccgaccggccttcgcgtccgatacggccatgcccgcgacagggattccgctttggagggcgacggcgtttgccgtattcgtggaaacatacgacgtcacatccgcggtcgcgccgtcgaccgcaatggtcgaggcctgcaatgtcagcgtaccgccgccatcgaagccgcctgcgtagacggtgccgccaagcagcacattggcctggttgggatagttgacggtgccatccggattggtgccgtgcgggaggacgttgaagtcggcagggctttcattgctaccaagattaccggagaaggcgccggtgtagagggatagggtcaagctaccacccttgccgaccggcaagccatcggacccgatcttgaccttgccggtcgtatcgacataaccgccgccggacaggtcgatgacgctgccaggcgagagcacgatgctttgagtgacgtcgacgaaggcgccgtcacctctgctcggcccgttgctggctgagagagttgagatactcacgctgccgccgttgacgtaagcgcgtccctcgagctgatccgccgacaagcctgtgtcgttaacccagcgcccgcgcacgtcgagcaccgcatgcggcccgatgaccagggccggaaccggcggctgcgccggctgaaacttgacgggataggtgaagccggtaaggctgagctggccggcgggcgcactgagtgtgccgtcaatcgtggcgacgttgtccagcgtgatgctgccaccaggccgcaccgacagaacggcattcgttgtcatgtctagccgatgcgcgcccgtgatcgagacggccccgagcgatgcattggagaggaggtcggtgaagatcgggaacaggccgttgacgagcgtaggcgaccagctcgacgcgttggcaaagttcaagccgccgagaccgtacggatccgccccggcagcggcctgcgacgtgagcaccaaattgttcgggttgccggtgcccgtcggattcgcgaacgtgatgctcagcgacgcacccttcggcatctggtcggcggacgagagattcgacgatcccgccagcgcgcgttgccggctgcccgccaccacgttgccgatgatgtcgttgacgatcggattgacggccgcgaccgtgaccgagccggcattggcgccggtgatgtagctcgcctcataatgcgaattgctgctgccgccccaggggctgagatagatctcagtcagcttggtatcgacgacgccattgaccttgtgcaggaccgtgaagccgccgccgacgcctacataggcaatggtgggatcggcgcggccgatgtcgtagacgcgcccgtcggcacccagcaggcgcgtcgtgctgatcaagccgccggtgtattgcacatagccggccgacacgttgatggtcgcgcccggctgctgcacgacattctttcctgatgtcgagaagctgccgccagccgtgaggatctggtctatgctttgcgggatcagcccgacatagccggccgcgttgagcagcggcgagccgacccatttcacaccgtcggcacgcgtgccgccgaggcgcgcatcgatggtcacggtcttgccgatcagggcctgggcgagcgggctgtcggcgacctccgccgcggtgacgaggatgctgatctgattgatcgacatcggcagcgtgaccccggtgatgccggagagatcgatggtgctgcccttctcgagcaggaccgtgccggcaacactgtcggcgccgatcgtcagcgcggcgcccggcgccttgatcatggcaccggcggcacccgcgccggtgccctgcacatcgacgctgccaaccgccgttatgctgagctgcggctgcagcaccgtttggaaatacggcgcgttgctggcgccgttcgctgatgtcggtgtgttgagcgtcgcggtcggcagggttccgctggtctcgtccggcaggatcgacgtgaggctcgccgaccccagcacgatattgccgtcggcaccggacgcgcagccgctttgcacgcaggccgtgttcatgttgatcgagccggtgcgggtggtcgaggtggtcgcgacgatgccaccgagctggttgatcgatccgcccgacagcgtgaccgcgccggaattggacgtcagcaggccggaagcctgattcgttaccacgcctccattggccagcacccgcatcgcggtctggacgccgactgcggtcgacagcggcgttaccagggtgacggagctgtccgacgccaggatgatctggccgttcctggtggtgatcgcaccggcattgctgacgccgccgtcgccgagcagcgcgacgtagccaccatcgccattcgcgctcagcttgccggttgtgtcgatgatcgcacccggctggaccgtgacctttccgctgccgctgcccacgttgaagatcgcagcacccgaagccgtattgggagggacaacactgaccggcacgttgccgagctgcgagaacagcccgctttgcaggaatcccttataattgctgccgctgagctgcgacggcagatccagcgtcgaggcgatcaaggtgtgcacattgatctggctggtgccgccgaagatgatgccgttctggttgatcaggtagaccgcgccgtcggccctgatcgttcccagaatctggctcggcacgccggccgacgcaatcctgttgagcgcggcccagttcgcgttgccctgctggttgaaattgacggtcgtgccgctgccgacattgaacgactgccaattcaacaccgcctggggctgagtctggttgatattgaccgtggtctggccgccgctgctggtctgcgtcggcgtggcggcaccgacccagttggtgacgggattggcgacgccgggcgcggccaggccgctgttcggcaccaggccgccggcattgaggccgttcggcactgcgctcggcgcgctcgctgccaacccgcgcgcgacgctctgggccgcctgcaatgcctggatcgcctgcgcggcgcgtgccatcgacgcttgcgagttctgcgcggcctgctgcgcctgctgtgcggcatcctgcgccgcgctgatcgccgcctgcgtggccgcgctgctgacgccaccccaggcgccgaacgggcgcgccgccgcgggcgagctcattgcgatcgcgatcgaacttgcacctgcgagcaacaggccacggcgcgagatcgagcgagggagcgaatgcatgcgggccttccaatgcagcagacgatgcgaacgatcgtgacgcaacgaggcaccggccagcctgcgatcagttggcccgatgccgacatctcagtgaaaagcgcgcaaccctgctggcgcagccgcccgcgagcggacacgcccgacagttcgggacgcctctctgatcttaagacagtttgagacgagctaacgcgaagcgatttcgcaaaaaagttttaaccctgcggtggaactcaacctcggcgcgaaccggccagttcaaaaacaccgtcgcgtcaattggttggcgatgctgctctggactgccggagcggccgctcggcgggcttcggcggcttcgccgcgccggtgaacagggcgaaatccaccgagcgttccccctgtttgagcacaagccggcgcggctcgatccgctcgaccttccagccgctcacgtcgtcaccggtgcgtacgcgcatcactttgtcgcctttgctcgcggcacggatcgcggcacgaccgtcgccattctcgctgacaatgccgagcaccaccacgctcggcggcggcggtggcggtggcgcttcctgccgcgccaccggcgcgaccggcttggccggcggacgccgcgccggcgagaacagcggcttgtcgatggtcgcgctcaactgttgcaagggctggacttcgaccggattgttgacgacgacctcgccgcctgccgcaagttccgcagcgcgcgcaaacaatgcgcaaagacaaagcccggcaaccatcaacatttgcactgcgatcgacatctgtcggctgtccctaggtctgagctggttgttttctgctcgcacctgtccgcgtgcaccggatcgtcatcaccgcgtgcaacaatcaacctgcgccaggagcgcctgcgttgcaaggcttctcgttactaggcaacgcgttgtgtcgcgcatcgcagcgtgtatgcgtcaaatctgtgaaagtgaatcacagccggacattgtcgccatgcgcgtcatgcgcgagctgttgttacgacggcgtcatccaagccccacacactccaggcgtgtagcaggcggcaacttgccggcgctgccgctttgcatcgacgcctaaaagccgtcgagacgaaacaccggtatcaaagacgtggcgtcatgcgttcgagtcgcatccgtgccggcctcatgccgctgctgctcggcgcgctgttcctggcgctggattgtgtcgtgacgtgcagcaccggatccgcgcaggcgctcgcggcatgcgagttgcgctcgcgcggcggcgtgatcaagcacgtcgtgcagatcgagctcgacaatgttcacctgcgccgcgacgaccccaacgtgccgtcggatctcgagcagatgccgcatttgcgcgacttcatcacgcgcgacggaatcatcggaagcaatcatcagacctcgccgcttgccgagaccgcgactgacgcgctcacgatcctgaccggtctgcatggcgaccggatgggcgttgcaaccggcaacagcaatgctgcgttccgcagcgacggcagcataggcttcgccagcgccttcgcctactggaccgcgaccagcagcgatggcaagccgctgatgttggccgacaccggcaagaccgtgcccgcaccgtgggtgccgttcacggccgccggctgcgacgtcggcgcgttcgcaacgaccggcctgacactgcaggagatcggccccgagatcgcggcaacgctcggcccctccgaagcccgcgccgctgccggcgatccgctcaaggggcgggccgatttccttggcattgcgatccattgcgctcgcggcagcgcattatgcagcaacgccaacgcacgttcggatctgctgcccgatgagccgggcggctacgccggcttcagcgcgttgttcggcaaccgcaatgtgcagccggtaatctcgccggacggcccggtcagggatcttgacggcgatatcatcgacgacgacgcaggtcacccgggctttcccggtgcgtcagcgacaacggccgcacaatcgctcggctatgccgcggcgatgctggaggccggcgtgccggtggtctatgtcggaatcggcgatgggcatcggccgcccaccacgcgccggcgcgccctcggccccggagagcacgaccatgtcgctaggctcgccgccgacgatgccgccttcaggagctttatcgaccggctgggcgcaagcgggatcaccacgcgcaatacgctgttcgtcgtcgtgcccacgggtaatgaccgttttgtcggcgggccgcccagcccgccagggtgcgacggccttgcggtgccttgcagctaccggccgatcggcgcgatcggcatcgccatcgatcggctgctcgcgaccgagcgccacaacgtgaccacgttcgatgttcaggtcggcaacgcgccgccgttctacatccgcggcaatccgctccccgccgatccgctgacacgcacgctcgcgcaggatgtcggcaggcttgccgtcgtcaacccggtcaccggcaacaccgatcgcctgacgtcgatggtcgcggaccgcgcgcagatgcagctcatgcacatggtgaccgcaagcccggcgcgcacgccgcatgtcatcatgttcgcagaccccgattacatcgtcaggacggccggcagccgcgccgactgtacgcaaccgccggcctgcgttgcggtcaatcccgacacggcgtgggtacgcggcgacatcgcgcagattctcggcggcagctggttcggcatggctgggccggggatcgcgcaccgcggcgagacacccgacatcctctcgcaccacgcggacctgcggcccaccctgctggcggtgctgggtctgaccgaccgctacacccacgacggcgtcgtgcttggagatgcgcttgagccgagcgcgctgccggctgagctcgcagacgatcgcgagacctatgtgtatctggcgcgtgccgccaagacgatcaacgatccgcttggccagctcggacgcaacagccttgcccttgcgacccaggccatcacgggcggcgatgtcggttatcaacgttatctcgacatgatggccgcgatcacgaccagacgcgatgccctgacacgcgagatcaacacgcaactcgatggcgctgctttcgggcatcggccaatcaatccgtcctacgcccgcgtactgatcggtcgcgccggggcattggtcaacgaggtcgaggacctcgccggcagcagcctggcccccgccgatcgtccctggaaggcagcaagcgatgcgcattgacaaccgaactgccggcgacaccgaaccatcggcgcagagcgggcaacagagactcggcgtgcggcaccctcgcaaggcgttgatcgccacatgtcttgcgctcgccggcctgctcggcggctgcatgatggacaagagcatcgacttgcccggacgcgaccaggttaccgatccgatccgcgatgccgacctgcgggcgcgctggaacggcccggtcggcggaacgtccggcgcagcggcctccgcgcgcacgcaacccatggtgtttcccggcgccgatcaggatctcgctgcaccgccgacgcagcgcgacgccgtcacggcgacgacgacgcgcttcgcgagcgccgttgacggcgacgtcgctaccgagagcggcggcatcgagctgaacttcgacaacgccgatattccgaccgtggcgaaatccgtcatcggcgacagcctcggaatgaactatatcgtcgacccgcgcgtgcagggcacgatcacgctggcctccgcgcaacggattccgcgcaaagacgtgctgccgatcttcgagagcgtgctgcgaatgtcgaatgcggcgctgctgcgcgaagacaatctgatccgcatcgtgccgctgccggaggccgcgggcgccggcgtctctgtcgtcggtgcgggacagcccggctatggcgtctcgatcgtaccactgcgtttcgtctctgccgcggccatcggcaagacggcggagagcttcctgtcgcggcccggcgccgttcgcgtcgatcaagcccgcaacgtgttgttgatccagggtaccgcctccgagcgacaggcggcgcttggcgtcatcggcacgcttgatgtggagtggctgcgcaatcagtcggtcgggctctatccgctgaagtcgaccgcgcccgagaccatgatccgcgagctcgagaaggtcttcgacaccgccgacggcggacagggacagggcgtgatcaagtttcagccggtgtcgcgcatgaacgccgtgctggcggtgagcaagaacagcaaggtgctggagcgcgccacccaatgggtgcggcggctggatcgttccgaccccaccggcacgacggtgcgggtctacagcctgcgcttcggcaacgcgcgcagcattgcccgcatcctcaacgagatgttcgtcggccgcaattcgcaatcggccagtgacagccagaccagtgcgaccgcgcccggtcagagcggaacgacgtcgcgcatcgactcgctcggtgccggcaccctcagcagcagcaacaatccgacgacgtcgccgcagggcggcacccagaactcgggcggcaccaacggcaacgcggcccaggtcggattctccgatcgcaaggacgacgaccaggatatgccgggggcgggcggcggcggaacggggctgggttcgctgccgcgcggcgtgtttcagaacgttcgcgtcactgccgacaaatcgaccaacgccatcatggtctattcgaaccaggaagattatcaggtgatcgagcgggcgatcgagtcgctcgatcgcccgcggctgcaggtcgccgtcgatgcgatggtcgccgaggtcacgctcacggaccagctgcaatatggcgtgcaggcctatctgaccagcgccaacgccggcgccggccctgacaagggatcggtcggcctgttcagcgccgcgcaatccgccgcgcagaccgccctgctcgcgcgcgtgctgcccggcttcaacctgttgctcggtgccgaggccaatccgaagctggtcctcagcgcgctgtccaatctcaccaccgtcaaggtgttgtcggctccgtcgctcgtggtcgccgacaacgagccggcgatcctcgaggtcggtgaccaggtgccgatctcgactggcagcaccgtcaccggcctcaatgtggtcagcagcatcagccgccagaacaccggcatcatcttgaaggtgctgccgcacgtgcatccgaatggatcgatcgagctcgaaatcgagcaggaggtctccaatgtcgtcaatccggccggcgcgagcgcccagaacctgacgccgaccatctcgcagcggcggatccactcgacggtcggcaccagcagcggccagaccgtgctgcttggcggcctcatcaaggaggacgacgagcgctcggtggccggactgcccggcctcaaccagatcaaatatctcggcgacctgctgagccagaagagcgacaccaagctccgctcggagatcatcgtgttcgtcacgacgaagctcgtgcgcaacggccacgatgcccaggtggtcgccgaggaattccgcgagcgcctcgacagcatgcggcgcgcaccgtcgaccttcgatgtgccgggcgcggcacggccggccgtcgcgcgcaaatgacgctgcggccgccgatggcgatggtcttatccattctccaggtgctgggtgcagccatcttcagcaccgccgcaatcgcggccgagctgagcagcgtgagcttgaagggcgacatcacgattgtcgcactcagcggcgacgtcgcccaaggcgacaccgaggctgcggaagccctgatcaaggccgccaacgacggcaaccgcctgatctccgcggtgaggctcgactcgccaggcggcagcctcgccgaggcgatcaagctcgccgggctgatccgccgggccaagctgccgacgatcgttgcggccgggtcgcgttgtgcgtcggcctgcttcatcgtgttcgcggcgggaaacgagaagttcgcgagctatgaggccgcgatcggcgtccacggcgtgtccgacaaattcggccatgagacggcgcaaaccgaagaggcgacgattgccatggcccgtgtcgccagcgggttcggcgtgccgccccgcatcatcggacagatggtggcaacgcacgcccacgagatcgcgtggctgacgcccgacgatctgcgcgccatgggcgcgatcatgaccgatcggccgcgacgccacgcgccgccgccgacgtcgccggacgatcgatggcttgctgggcttgggaatcagccggaggacgcagcgacgaggtcgcaagcggccgatcagcccgcgcacgaggccgccggaagatccgggcagcatgtcctgcctcgacaaggaaggtaaggcagaggcgacctgctcggaaaggctcgcccaacaactcgatatgccgctgatcgcagcaacattcactcgttgctggcggcgctcgtcagcttgtccaacgagatgtcgccggcggtcccgctgccaccctcctgaccatcggagccataggagagaatatcgtaggcatcgcgttcgccgggcgcccgatagatatagggatgactccacggatcatttggaaccacgccgcccttgagataaggaccgttccagttgggcgcgccagacgttcgctgcaccagcgccgtgagcccctctgcagtcgtcgggtaacgaccggtatcgagctggaacaggtcgagcgcgctcgcaaagctccgcatctggatcttggcggccttgaccttcgattcactcaggtagctcagcacgcgcgggccgaccaatcccatgatcaggccgatgatggcgatgacgaccagcatctcgacaagcgtgaatccccgctcgccctgccgcgtcttgtgtcgctcgagacgcccggaaacaaggatggaattttgcttcgacatcactgttcgtccaatactgttcgtcccatgagcggcaaggcaaggatcgtcaccagactttcgacgctctggggtagttccgggcgcctcgattgaggcgcccggccttgtcatgtgctcgacaccatctcggtacagcgcaatcgcgattgcgccgtccacaatgcgccgatttacttggcgccgccgctggcgccgttggccacgttcaagcagccgttcgtctgggtagcggcagccgcgctgatggcggtcggcagcgtgccccagtactgcttcttgatgttctgcgcatagctgaccggcaccgcgtggaagccggcattctcgatcaccgccgagacgtccggatcgaagttcggatcggtcgagtcggcaccggcaacgtaggtggtcaggaagttgaccaggttggtttggcggttggcgtcggcctggacgttgtagcagctgtacaggtcgaggaacgtcgtgccgctgagcggataggcgttcagcttgttggtgagcggcaacaccggcaggccggtgacggtcacgcccgactgggtgacagcgccgaacacgttggcgtagatgttgtagtcgttccaggtccaggtcgtggagggcgtcttgagcctcgtgtcagcccacgcggcagcggcgccatccggtgtcggtgcgataaatgtcaagctcgccggctgagtcgctggcgacactccgtggctcggaacataggtgccggcactgcgcagctgctcgttcgacagagccgccgagcgcggcgcagcgatggtcccaacctgtgtggtgtagggctgggtgaagtcggcgctgatgtatccgatacggccggccttgctgctgtcggtgctgatcgcagatgccacgcctccgctgccttgcgcgctgatccaggcgttcgtcgccgtcgtgttgttccagcctcccgcgccacggaccgcagcgatgcgggtgatcaggttcgagaaactggtgctcggcagggttgtggtgttgaagatcgactggtaaccgtacgcaccggtggaatcgagcagcgggcagacggccttgagatagttggtcaggatgaagctcgtgccgctgccatcgccgcggtacacgatcttgatcggcaaggacgagctcgtgtagcgttgtgccgcgcctgtgttgtcgatgttggtgtagtcgaaggccgcgagcacttggccgccggcgttgttgaggtacgggatcttgccgacggtgatgtcgttccagtcggtcacgaggccggtaaagatcgcgcacagctgcgcggtcgagagctggatggccgcgccctggttggcctgggtgcccggcgtggcgccggtgccggcgaccgccgagtagacggtcatcgagctggtgttgacgccgatcgcgacgttgacttcgaaagccgggatctggatcggattgccgaacaccgtggcgttgtaggcgaccgaagccgtcgaggtgctgttcagcgtgatctgggtcagcgcgccgccggtggtggtccagctctgcgtcgggttgaagctgaccgacgacgtggtcagcgtcgtggacgtaccaacgaaggccagcggcgaatccgacaggccgatgtcgacgcgcggatagggatagctgccgaactgggtcgccgggcttcccggattggcgaggtcgatcgtcgcgggctggttcgcgggcagcggcgtgttgatcgagatgttggccgacgggttcggcgtgaccgtgccgttgtaccactgctgcggatcgttggtgatgaagccgcgcacgccgttgccgctgccgacgccggcatacatgccttgtatcggcaggctcgtcagcgtgcaggtggtcggcagcttgcccggcgccgggaagctcgggtcgaacgcgaagccgtcgggataggcggtgccgaagccgacgttggcgcccatgtagcagtcgaagatctggcggaaggcttccgaggcgagcgtgctgccgcccgtgtagatgccggcagtggcggtggaggcctgcgcgttcgcgggcgtgatgctcgaggacgcgagcagggcgagcaccgaagcggtgccgagcatgtatttggacgattgcattttcattgcgctgttcctgtggggttgatcaccaccggcacacatcgtcatcgcgtcgtcacgagagtgcaaagtaatcttcaagcaagaagaagtttactttctacctaaccaagatttattggaataaatctatgattaggcaagcacctctgccgtcgacgtcatgtctccgtcgccgatgattgacttcacgtctgatagacaattcgacgattgggatcgcgcagggattattttcgatcagctcccgaaaaacatcttggcaatacctcgtcagatgctctatggactctgcgtccgacagctcgctgtctgatcgcaagtgatagacagagcaatctccgcgggctttcattcaagcgaggcctcccacatggaagacaactcgagcgggcgtcttgcgattcgtgtggggcatggcggccatgcaattttggcgcgcccgctgaacggcggctatccatcgactgacctgaagcgggcgcaagcgctgcatcaggagggcgtggcacacgcacgccaggatcgctggcgcccggcgctgcgcgcattcaacgaagcggtgcggctcgcgcccgatcagtccggcttcaattattgcaagggcgtcgcactgtgccggttcgatcgcttcgacgacgcgcgcgaggcattcgccgcggaactcagggtgacaccgacgcatgcgccggcgcttgccgagatcggcacctgcctcgcacgcaccggacgcacccgcgacggcattccctatctccaggatggattgcgcctgctgccgaagatgccgctcgcacagtacagcctcggccttgcgctcctgaccgagaaccggcgcagcgaggccctcgcggcgctggacaaggcgatcgagctcgatgccggaaacggggaagcctatcgcacccgcggcctcgcctatgtgatggacggacagttcgacaaggcggtcgacgatctccgggccgcctcgacgatcgacagcgacaattacaaggcgatcatcgagctcggcatgaatttcggcatcgccgcgcgcgaccagcaggcggcgcggctgttcgagatcgccgccgaaagcgcgccgaccgtcgcgctgccgcaatatctctacggccactttctgatcaatcaccgcgcgttcgagcgcgggctcagctatgtcgaccgcgcgctggcgattgatccgctgcaggcggagcatcatgtcggccgcggcttcggattgcttggacaaggtcgcatcgaggaggccgtcgcggcctaccggcgcgccggcgagctcgatcccggaagcgccggcatcgccggaaccctgctgttcgcacttcagcacaagccgggcgtgacgcgcggcgagctgctgcgcgagcaccagcgatgggcgatgctgtaccggccgagcgcgccgctcaatcgtcttgcattcgccaacgtgccggatccggcgcgcaagccgcggctcggcctggtgtcggcggacctgcaccggcatgccgtgtcgttcctggtgctgcgcgccttcgaggcgctcgccgcgctcggctacgagatctgttgctacaagaccgacagcaagcggcaggacgacgatttcagcgaacgctacaaggaaatctcgctgtcctggcgcgacgtctcggggatggacgatcaggccctcgggcaacagattgccgaggaccgtatcgatgtcctgttcgatctcgccggccacaccgccggtaaccgactctcgctgttcgcgatgcgcgcggcgccgatccagctcagctgggccggctatgtcggcacggtcgggctcgacacctatgacggtctgatcgccgatccggtggagattccgccggagcacgacgcgagctatatcgagcgcccgatccgcctgcccgactgctatgtctgctatcacccgccggccaaggcgcccgaggtgccgccgctgccgagcttgagcggcggccgcttcaccttcggctgcttcaaccgtccggcgaagctcaacagcgagctcggcaaggcctgggcgcggatactcgagcaggtgccggattcccgcatcctgatggtttatggcggcctcggcgagaccagcacgcgcgatgcggtctacaacgtgctcggccagggcggcatgccacgcgagcgggtcgagctggtcggcgaaaccgagcaggacaagctgcttgtggcctacggtgaggtcgatgtcgcgctcgatccgtttccctattctgccggcgtcacgacgctcgaggcgatgtggatgggcgttccgaccgtgaccttcgtcggcgatacgttcgccggccgtcactcggcggcccatctcaccgcggcgggactgggcagcttttgcgcgcacagcatcgacgactacgtcgccatggcagtcggatggacgcgccggcgcgatgaactcgccgagttgcgccgtacgctgcgcgaccgcgtcgccgcctcgccgctttgtgacgcgccgcgcttcgccgacaatctctcgcgcgaattgatgaagctctgggcggagtggtgcgaggcccgcaccaacgcggcggcctagagcatgatccggaacagtacgacgcgggtttccgaaatgaccatgctcgaacaacgagctagagcgcgatgacgatccgacctgatctcatcgcgcgtcagccgcaatcgcgggcgaagcggacaaaataacgggccgtcgcttggccgaacgacacgcaggtcgagagtaaggggtgcgttgatgtcgaaggcagggatcagcgaggcgcagacgatgcgtgcagggctggcgatgctgaatcaagcttcgtccgggcggcgcgcggaattcatccagactgtcatgaaccgcgccatcgcgctgtttcgcgacggccagctggacagcgctgatctgctgctcgaaaccatggagcaggaacccgcagtgcggccacacgtcctgcacattcgcggcgtgatcgcgctgcagcgtgacgatgacgagcgggcactggagctgatcgaggaagcagtcaggctcaatccagccgacggagaagcgcatggcaatctcggcgtcctgctgctgaagggccgccagtatccgcaggcgctggccgcctacactgccgcgctgacgctgcggccggacaatctagcggcgcagctcggccttgcccgcgcgctggcgatgctcgaactgagcgatttcgccgacgaggtattcagcgacctgatcgctggcgctcccgattacatcgatgcgatcgtcgatttcggatggttgctcagcgacaccaaccggcacgacgcaggcatcacgttgctacgtagcgcgctggaacgatacccggagcgcgcagaactgcgcgccgtgcttgccgtctgcctgttcggcgtcggcagctggtcggcggcctgggcggagtatgaagggcggctgtcggatccgcgtgtcagcaggcatttgatctcgaccgaccggccccgttggcagggtgaggaccttgccggcaggaccatcctgctgcaatccgagcaaggctttggcgacaccattcaattcgtgcgctatgcgccgatggtgaaagcgcggggtggccgcgtaatcctgcgaacgccgcaagtcttgctgtccctgatgcaaaccgtcgccggcgtcgatgaagtgatcagtgatacgaccatggcgccggcattcgacgtccagctgccgctgctgtctttgccgctgatcttcgatacgcaggtcgacgccgttccggcgacaattccctacgtcgctcccgatcaggatctggtcgcgcgatggcgcgagcgcctcggcggcaatcccggccaccgcatctccgtcggcctggtttggcaaggcaatcccggccatctcaatgatcagcgccgctcgatccggctcgatctgctacgtcccctgctcgactgtccgggcacacggtttgtgagcctgcagatcggccgcggacgcgagcagctcgccgatttcgacgagcgtatcctcgataccgccgcacagatcgatgtggcatccttcgccgatgcggcggcgatcatcggcaatctcgacctcgtcatctcgatcgacagcgcgatcgcgcatcttgccggggcgatgggaaagccggtctggattctgctcgccaacggcagcgattggcgttggctccgggatcgcagcgatacgccctggtatccgcaagcccggctgttcaggcagacaagaccgggcgattgggcggaggtgattggacggctgaactccgcgctgaggtcgctcgccggggccggctccgagcagacgaccgaatcgatcaccgaccagatcatggcctccgcgctcaagatgacggtcccgcaccaggagaataacgcgctgatgtgcgacgccctgttcgtcgaggcctgccgccagcatcgcgcaggcaagctggatcgcgccaccagactcttcgagcacgttctttgcctcgatcacggacacatcaacacattgtgcaatctcggcgcgatcgagctcggccgcggccaccatgagcgcgcccacacgttgctgcagaccgcagtcacgacggcgcccgacctggcgccggcacgtattgcgctcgccgacgtgctgatcgctacccacaggagcgagcaagcggttgcgcaataccgcaaggcgatcgagcttgcgccgacgagcgtcgatgcgcacgcggcctacgcaaatgcgctgcgaaagctccgcggtgacgagcaggcaagcggcatgcatgccgatatgttgaagcgacagctacatcagcattaccgcaaggcgctggaactcgcgcccaccagcgacgcattgcatgcgcaatatgcactggccctctgcgaactcggcgatatcgataacgccatgctgcactttttggcggcaacgaagatcaatcagcaacagtcttcggaattctacgaagcgcttggtcgcgcatgtgccgcgcgcggcaattcgcagggcgcggaaatcagcctgaaacacgcggttgcgctcgatccgcgccgggtgaccgcccattgtgcgcttgccgatctctatctcacgctcgaacgcccagatgaagcatcgacaagtttccgtgaggcgctggcaatcgatgccggaagtgctgcggccttgctcggaattgagcgggcggtgcagcggaacacaatcgtcagcggaatatcgtgacatgcgtttcctcaccggtgttcgcttcgtgctcgacgcttgcgaacgatcttgtgtggccgcagccgtgacgcgcgcagcacgcgtgcagcacgcagatcaattccgcatcatcgatcgtggcgtggcatgccgtgacgtgaacactcgctgtggtttcatttccatgtcaccaatcgtcgctagaaatgtcgtgacggacttgaaatgtgacgattgccgcggttggggatggggcccctgcaatgagcgacaccaatcgaacggcgttgctcgcgctcctcgtcacaagctacgacgatctcaaacaacgtttgacacggcggaccggatcggccgatctcgccgacgaggcgttgcaagacacgtttctgcgcttgagcaaagcggacggcatcggaccagttcgcgatttgcccgcatatctgttccgcgtggcgatgagcgccatcagcaaccggcgtgtcgccgaacgtcgccgtcgcacggtgccgcaagcggatacggtgttcgatctgccggacgaaactcccggcccggaccggatcatcgaggcgcgatccgagatcagtgcgctccgccgcgccatccaggaactacctgcgcgtcgccgggagatcttcatggcgatatgcgttgaagaaatcccgttgcaacaagtggcgaagcggttcggcatcagcgtgcgcacggtccaggtcgagatcaagcaggcgctggtgcattgcgcggtgtgcatcgatcggaacgcgcagatgccgcgggtcgggtttcggcgtcgaaacccgttcagcgaacgggaccgcgcggcgcttcatccagcgagcgaaagcgatacgctgcttggccggcgattgccgttgggcggcagcaggtgatgcacgatggcaaggcagatccacatcgtccgtcgcgccggggtcgccacatcgcgcccggcgcttgagctgcaacatcctcaccaaggtcgacgtcgcaaggtcggggcagtcggagcgaagcaatgctagcgcgtgacaacggtgcgccggcgacacctgtggcgccgccgatcgacttcatggcgtacctcgccggccggggcgcgttgcgcgacagccagaaggatgaaggcgctggtcgcccgcgcaacggcgacgggtcggccggccatgtcgactggagcgccgtcaccaagctgacgtcgtcggcgctggccgacgagctcgccagcttttacggttgcgaccgggttcgccgcgacgacctggtggacggacgctttgccggcgccgagatgtcgacccggttcctcaaggaggagcgcctgtttccttacgagggcgcggccggaatgttacgtctggcagtggcttccccgattgacgaagagacgttgcgagcggtcgaactcatgctgcgccggccggtcgcgcttgcggccgcgaccgccgacgatctcgaagccgcattggcgctgcggctcgagccggatcaaccgggcgataccccgcaggccgcgaccggcgccggtgaggatgatctcgacaatctgcgtgatctcgcgcgcggcgcgccggtcgtgcgggcgctcgacgatctgctccgcctggccgtcgagcaacgcgcgaccgatctgcacatcgagccgaccggcaatgcactgcaggctcgcctgcgcgtcgacggcatgctgaagaacgttccggcaccgccgatggcgatggccaagggcatcctgtcacgcctcaagatcatggccggcctcaacatcaccgagcgccgactggcgcaggacggacgcgcgcacattgtggtcggtggcaacgggatcgacctgcgggtcgccaccatgccgacgatgcacggcgaatgcgcggtcattcgcctgttgcgcaagggggccggcctggtctcgctcgaccagatcgggctcagcgcgcatcacgaggcaatcctgcgcaaggcgctgcttgccccctatggcatggtcatcgtcaccggcccgaccggatccggcaagacgacgacgctggctgcttcgctcgcggtgatcaacgagcccacccgcaagatcctgaccatcgaggaccccgtcgagtaccagataccgggcattacccagacccaggtgcatccgggcatcgggcttaccttcgcatccgcgctgcgctccttcatgcggctcgaccccgacgtcatcatggtcggcgagatgcgcgattccgagacggcccatatcggcgtccacgccgcgctgaccggccatctggtgctgacgacgctgcacaccaacaccgccgctggcgccgtcacgcgcctgatcgacatgggaatcgagagcttcctgctggcctcgtgcgcacgggtgatcgtggcacagcgactggtccgaattctgtgcgatcactgcaaggaaccgcacaccctgtcggccgccgacatcgcggccgacgaacgctatgcagcgctcggcatcgaggccggtgaggtgatctgccggcccaagggctgtgactggtgcggctcgaccggcttccgcggccgcaagggcgtgttcgagatcatggagatcggtccggcactgcgacggtcgatcggcccgaaaaccgatgcctccgacctcgaggccgttgcccggcgcgccggcatgacctcgatgaccgaggacggcgtcgcaaagattcgtgccgggcaaaccacgctcgacgagatattccgattgaccatgagcctgtaggacggtcatgccgcactatcgctaccgcgcgttgaccaaggccggcgagatcattctcggcgacgtcgacgcgccgtcgcgcgaggaggtgctgcggcggatcgagtatctcggccacctgccggtcgaggccgaggtcgcgggccgcagcgcactgcgcgccggtgtttcaagcgggagcctgccccggccacgcgagctcaccacattcctccgcctgctggccttgctgcttcgctctggactgacgctggaagcggcgctccagaccctggaggaagacaccaacaaggcggtggcccgttttgccggagggctgcgttcagcggtctccggcggcgacggcttcgccgaggcactggagcgccacaaccagatcatcgaacagatctacatcgcgatggtgcgcgccggcgaagcgtccggcaagctggaagtggtgctgcgggcgatcgtcgaggaccggacgcggcgcgagcagctgtcgcaacggatcacctcggcggtccgctatcccatgttcctggtcgggtcggcactcgtcatcctgtccttcttcctgctctatgtcgtgccgcagttcgaatcggtgttcaccgagctgcgcggacgtctcaattccggcgcggcgtttgcgctcacgatgtcgacctggctgcgcgcccatctcgacacgttccttggcggctgcggcgcggtgctgttgctcggctggctgatgctgcgccagccggccgcgcgcgcatcgctgatggcgctgctcgcgaccatccccggcatatccggcccgatgcacgatcgccgcaccgcccgtttcatcggcacgctcggactgctggtcgagaacggcgtcgcattgccgaccgcgctgaagatcctgcgcgatatcatgacggagccccgctacgccgcggcggtcgagcaggtgcatgagcaggtgcgcaacggccggcgtttcatcgaggcgctgtccgagagcgacctggtgccgccgcttgcggtccgcatgctccgggtcggtgacgagaccggagatctgtcggcaatcgcacagcacgccgcagatctctacgagcagcggctcgccatcggcctcgaccggctgatgggcgcgatcggaccgatcaccatcatcgcggtcagcatcggcatcggaactctggtggtatcgatcatgagcgcgctgctcagcatcaccgagcttgcgatgtagggatggccgatggcgcgcacgacaatcagcggttcgatggcgggctccaccctgatcgagatgatggcggtgatgctgatcatcgcgatgttggcatcgctggtggtggcgaccgttccgggcaccgggcgcggcagcctgaaggcgctgacgctgcaaaccgtagcgctgctgcgacgcgagcgacttgcggcgattctcaccgggcagagccgccgcgtgtcgctcgacggcaatacgcgcacgatcgtcgcgcaggccggtacgatcgcgatcccccgcgacgtccgggtcgatgtgattggcgtcaacgagctctggtcgggacggcaggcggtcgtgcggttcgagccggacggcgcctcgaccggctcggtgctgaagttctcctgggagaatgtgcgctatgaggtggacgtcaactggtacaacggccgcgttgcggtcgatctgccctgaacctcgcgcagctgaggcagggttcaccttgatcgaggcgctggtcgcaatggcgctgctcctggcgttcgtatcggtgctcggcccgcatcttttttacgcacgcaggatcgcggacaagatcgacggccgtattgcagctcaggtcttgttgcgcacgatcctggattctccggtcgatcgtgcgattctcgcaaatggaacgcgtgacggcgagaccgccgggttgcgttggtcggtcacgtcggagccgatgttcgtcggtgccatcgccgtacggcgggacgcgccgacgtcaaccccgccggacaagaaggcggaggcggcaacgaagcggccgaactggatcgcgtaccatctcgttgcgacggtgtcgtgggcgcccggacagatggtcagcgcggatacgttgcggctcggacctgaggctgacgaatgagcaccccacctcgcagagtagtccatgcgtcgcgtggcttcacgctgatcgaggtgcttgccgcgctcgcgatcgggtccgcggtgattgccgcaaccgcggtgctgatcaacaacgtcgcgctgaatttcgatcgcaggacgggcctggtgggaaagaccgatcagttgctgctcgcggtcgaccgcctcgcggcggatatcgggtcggcccggcaggtgaaacagggggacggcgcggacgcgacggccgccttcgacggcgacgcgaaccggatgacgttcgtcaccggaagcagtgcgggtggtggccagggcgaggaagtcgtcagcctgcaggtcgaggagacggacggtgtcaatcgtctggtccggcgccgggcccgatggcaaggacagcgcacgccgttcgcgggcgtcgcgctgcaagacccggtccgcatgatcgaaggccaggtcgacatcacattcgcgttcggaaatcctggcccggacgggaccttgtcctggagcgcgacatgggccggacagccgctgctgccgcagttggtgcggctgaccgttcgggatcgcgcgagcggcgccgatctgttgcctggcgttcagtttacgttgcgcgccgacgccccgatgggctgcgctcagcccggagccaacgccgactgcgtcaccggcaagtccggatcgccaaaggagacaccggtcaagggcccggcgccgggagcacgccgatgagcaagcatcatgcccaacgcggcatggttctgctcgccgtgctttgggcgatcgcgctgtgcgccctcctcgccatggccacgtcgacgacgtttcgcagcctcgccggcatcgttcggatcgaccgggagcgcgtgcaagccgatgggctgctggccgcagggctcgaggccgccgccggcatcgttgcggcgtcgcgagatgctccgcttaccgagcgcagctccacgctgacattcgcagccggatcggtccagctgaccgtcagcgacgaaggcggccgcatcgacatcggaagggccccggtcgagctgctcgcgtcactgctgcgcagtgtcggtgccgaggatgacgatgccggcatcctggcgcaacggatcgtcgcgctacgcgagtctgcagggcaagcacgaccgaacgatgcgcagccgcggccgaacgatagggcgaagccatcggcgcccgccaagccggaccagcccgcggccacgcctgctgccgcaccgttcaccgacatcgggcagatcgccggtattcccggcatgcagccgcagtggatggccgcgatggcaccgctgatcaccgtgttcggcggcgacggcgtcgatccgctcaccgcaccggtggcggtactgcgggccctgccgtcgttcgatgcggagcgtctcgacaccttcctcgacatgcggagttctccgttggtcgatcccgagcggctctccttcctgctcggaccggcgcagaaatatctgaaggcgccgcagacgcatgtggtcgcggtgaacctcgtcgccggcacgaccggcggatacaccgcgagagccaaggcgttcatcgtgctgctccccgacgacaagcagccgtaccgggttctggcctggacaccggtatcgcggttcgcaacgccaggtgcggtcgcatcgctggaggtgccctgatgaacatcgacgtgatcatgcgacgctggatcgacatcctcgcccggctgtggctcggctggcaggagcggcgccgcgcccggcattggttgaaagtgaccagggtcggcagcgaatggattcttgaagacgcgaagaaatcgacgagatcgacgtccgcggcggggtctgcaggcatcgcgctgccggacgagatcgttcgcgccgcgcagaaatcgttcgtcattctcgagcttcccgcccccgatattgtttcgcgcgcgatgaccgttccggcacaggcgcgcgatcttctggcgggcatcgtgcgcaatcagatcgagcgactgtttccatggcgggcgagccaggccgcctacggcttcaaggtagccgccggcgccgacgcaaatatcctcaatgtgcaggtcctcgccacctcgcgcgcgacgctcgacgaggcatgcggtgagctccgtgccctggggctgcgggtcgatcgcgtcgttgcaggcaaggaccgcgatgacggagcgatcacgctgtggtcgcgcctggcccatgcgaccgacagcaacctgtcgcggacacgccgaatggtcgccggcctgatgatcggagcggtctgtctgacgctggtcgtcaacgtctgggccttcatgagtgcggcatccgcggacggcgacagcgacgaaatcggaccgcgcgttgcgacgctgcagcgccagatcaggggcagctcgtcgaaagcggccatcgcctcgctcgcgccggccgagcgggcgcgcgccctgaaggagacgtcgccggttgcagtggtggtggtcgaagcgctgtcccgcgccctccccgatacgtcctatctcaccgagatgaacatggacggctcgacgctgcgcatcacaggcctggcaggcgatgcgccgtcgctgatcgcgccgctcgaacgctccgggcatttcaaggatgtgcatttctttgccccgaccacgcgcaatgccgacggcggccgcttcgtgttccatatcgaggcgcgcgtcgagccgcatgtcaggatcgatggagagtgaaccgtgccgaagccgaggctcaacttcaagttcgacatcagccgcgagcaggtcttcgcggtcggcggcttctgcgcgctgctgatgctctgtgcgatcgcgattgccggcgcgctgcaggcacgttccaacgctctgcaacacctcgccgaacagcgcgacgagctggcggcgctggaggcacattcgcggccggctgccaacaagggtgcacagacccaacgcctcgcagcgccagcagcggccttcctggatgcgccgaccagcggcctcgccaccgcgcagttgcaggcctatctctccgaactggtgacaagcgagcatgccgtcctggtctcgtcgggcgttcccgccgagcgcgacgacaagagcgacgccatcagactgcagatctccctgaatgccacgctttcggcgctgcagacattgctctaccggctcgaaagcggcaccccctatgtgttcgtcgacgcactgctagtgcagcccggaggatcggccgaacgcagcgccggcgatctggtgttgaaggtcaatctgacggtgcacgccttctggcgccgcaggacggcttgaccgacggtgtcccaatcggacggatgctattcggccgccgctttcaactggccgcggaagtagccgatcgttcgctcgaggccacggccgagatcgatagccggctcccagccgagcaccgcgcgcgccagcgaaatgtccggctgcctttgccgggggtcatcggacggcagcggcgcgaacaccagtctgcttcttgatccggtcattgcaatgacctgctcggccagttcgcggatggtgaactctctgggattgccgatattgattggcccggtgaaatcgttcggcgtgtccatcgcccggatcatcgcctcgatcagatcgtcgacgtagcagaagctgcgggtctggcggccgtcaccgtagatggtgatatcattgccgctgagcgcctggacgatgaagttcgacaccacccggccatcattggggtgcatgcggggcccgtaggtgttgaatatccgcacgaccttgatccgcaggccgtgctgtcgccaatagtcgaagaacaacgtctcggcacagcgcttgccttcatcatagcaggagcgcagtccgatcggattgacgtgtccccaataggcttcgacctgcggatggatttccggatcgccatagacctccgaggtcgacgcctggaggatctttgccttcacgcgcttggcaagaccaagcatgttgatggcgccgtgaacgctggtcttggtggtctgcaccggatcgaactggtaatgaatcggcgaagccggacacgccagattgtagatctggtccacctcgacatagagcgggaacgtgacgtcgtggcgcatgacctcgaaccggggattgccgaccagatgcgcaatgttggcccggctgccggtgaagtaattgtcgacgcagagcacatcgtggccctgctcgacgagccgctcgcacagatgtgagccaagaaatccggccccgccggtcaccagcacttttgccacgtcactccctcttcatgtccgagcctgaaggcggttgccagacccatgcgcgtcgacgcgagggaacgtagccggcgacatgcgaacaatcgccgccctgtgaaccgaacaccatccactgcgtgactttccagatttcgttgcgtcggagcgccgccccggcaatgacgcagttattccagggagcaaccacgaactggatatcgtagcagcccggcacgatgcgcgagaccgtgtgcaatcgcgacggcggcaacgcctcggtaaattgatccggcccccactgccccgctccacacggcgaaatgtagagatgctgcagcggcgtgttggaggcattgacgatggtgaattcagccgcatcggcgcgagacgagagtatcgccgccatcgccgtcagaacgagctgtcgataggatgagcgaaacatgggggcgaacgcactgcggacattcattgcaactgccgcgtggcaggcagcggacgttagcatcgcgccattgcagttttgtggcgtttcccgttgtaattgtcttgtccgcactgcgttgcgcgaatgactgcgcagtgtcgaacgtgcgcagttgatcgtttcgtagcgcttgcgttttgcgtgatgcgagaagagctgatgcgacttcgcgcaaatatccgatcgcttggtgaggtgcgacgattcacgccgggctaacgtgcaaaaaatttctcgcgtgtcgatccgaatttcgcctcaacgtcgagcagtgtcggcggtgagagctgcgtcgtgacggcgcagatgatctgacgacacgcccgcactctcgagccggtcttcgccggcctccatgtcaagcattttcgcctgcgcgccacagagcgacggccgaggatatttttcgtctgcggcgaatccggcatgatttgaacatcgctcaacctcgcgcggcggcgcgactcgatgccgagcacgggtcgacttggagccaacgccgcattccttgtgcgcaagccggtccctgtcctcaacggccgcacgggcctggaccggggcgaatctatttttctatcaaaatcaacgactcaattactggctggggcgggagggatcgaacctccgaatggcggaatcaaaacctgcttgtttattcaatgatttcaacgcgcgtttgcacaatcatcccgtttagcgagccttgctcggcgagggataaaaagctggtgaactaccgatcgggtggaaccacaaatagacagccaacagccatcccggattagcgcctcccctgctatcgctgcggagcttgtggtggcgcgtcgccagacgaacagtggcgacattttcgcgcaggtcattgaggattccaggccatcgaagaaccagagcacgctctcgatgaacttgaaagtaactcgatgatctacggccacttgccggcaaagaagcgctgtttgcggcggtggtggcccgcaccatcgaggacaagttaacgagccttggatagcaatcgtcgagagagtggtcgaggaaacgcttggcatggtgggcgagacgatcgcgcaatcgcagcggttccccgagccgaagagccctcgcgggagagccggtgccactcgtttggctggacactcggcggaggtgatcgttagctccgttggatgggggaccgcgtacgctctgcgcgctgccgccaactttcggagattgaaacggacgaagggctcactagatcctcggatcgctcgtcaccgcggacacaccatgtcgtaaacccaactcagagccggcctgtctcgctgacacgcagacccgcaataaaaatatccagcgccagctcgtatgcttcatcgtaagaaaatgtatgtaagaacgcatccatgaattcgtgcagggcaaagccgcggaccagacatcggagaatttgcaaggcgacatcgcctttccggccgctgagattgcattcagcgaacaccgcgatcatgaactcgtggacctcctgataagctcgatgccattccggacattcggttacaggtgcgcgaaaagtcgttgcagccagtgcagggtgctcgaccgcaaaccggcgcatttcagtggcgactgccctgagcgccgaaaacgacgatttgccgttccgtgcgctttcgagccgacccaaaagattccggcacgacctgatcgcgaaaaaccgccggatctccggaatgctggtgcgtggttcacctgaggcgagttccaattcggccgcaatgtcgtgcgcgagccgcttgtcccagttcgaggccaggatttcatcaatcgagaaatcgcgcgggtgcttcatcgagcggattcctttccagtgcgaagcaaggctgctgccgttcatagttgacttcaagtttgttgccgcggacccagacccgcctgcatcgtcgaaataccggcttcgggcccgacgcgaaaatcagaaagaatctggtcaggtcttgcggatctcggaccaacaagcgcgctccgccatcccacacgcttagaacttggcaatcggtcgaccatgactcgtcaagggcgacgcaccgcgcatccaacggatcagtgaacgtgacccttttcggtttggcgcgaagtgctggaaagcctaacgtctgaggtcggcctttcgcaggatcagatccggtcgattgccttggagctatcgacggaggcttcttttcgtgtccggacgtgttcagcatcgttgcacggcgcaagtcgttttatggatattcgacgggacttttgagtcgctatttcttcgacagttggctaaggcggacgcattcctgggaattttcgaacaagactgagcataagcccctcctcggggggcgctcggtcgaatgagcgccattgctcggccaaacgacggtaaagggatcgttacttgcggacagttttcacaaccgatcaggtgcatgctcgcgaccgatttgactattggcatagcgtcgcttgccaacggatcgtggagcacgagacgatccccgcggatcggttgaactttggggcctcaattgaggttggcggcttgggcaatctggaacttgtccagtttcgcaattctcctatgcaggtaagccacaccctcgcgcaagcgactcgcgcgcgttccgaccaactattcgtgtgttaccaggtctccggttccgtcttgatcgcacaaaatgcacgcgaagtgactttgagcgcgggaaacctcacgctgatcgatccattgcttccatatgactgcaggttctttgatggctcgaagacgctcgttttgaaggtgccgcggctcgagttgcgagcccgccttggtcgaaatcgggaacttgtcgcccgtctcgtccgtccgatccgggtcgatgacagcctgaccctgacgctcactgggatgctgccctctctcgccgcgaagatggcgtctgtcacggaggagatggtgggcaatcacgcggtggacctgattgccttgtccatcgcccgaactcttgagggcggaagtgttcgggtttcgtcatcaaaggcgattttgcttgctcgtattcgtacggcgatagaggcgaggctgaccgattcgaatctgcatgcacaggacatagctgaagcggtcggcatcagtgttcgctatgcgaatgaactcttgtcagcgcaagacacgtccataatgcaactggtgctggcgaggcgtctggcccggtgccgatacgctctggaggatcccgatcaggctcatcgtactgtgagcgaaatagcatatgggtggggattcggtgatctcactcacttcgggcggaaattcaaagccacttacggcattaccccaagcgaatgccaggtgctggctcgccggatgcaagtgatcacgacttgaagctgaaaattacatcgcattcaccaacgtcaattgcatcgggcgaacttcgcgagtgcgaccgctgacaatttgcagtggcgccgtgacaatcgtcaatgcagccgttggctgctgacgttagcgagatcggatgtcgaggccccaaaatggcggcgatgccggatcgggcgagaacatttgtaggaaagcctcctcgatatccgctaagggtttctcggcaacgagcgtctccgctctttccgaccaggagccgatattcatgaaccgtattcgtccctttctcgccgcgatcgcccttgttctggcaacccttgttcaaggacttggccgagccgcaggtcaggaaatcgccctgacgcccatggagtcgaaggaggtcgccaaaggctatcgggctgaggccctcaagctaaagcctgtgatcagcgacaagggcgagatgatcggaaggattagcgacttcatatttggtaaggatggcaacatctacgccgtcctcgcggtcagcgatctcgttggctccggtggtcatctcgtcgcaatacccttccatggtctcaagctcgacgatcaacgtggagagattgtgcttccaggcgccagccaggcagctctcggaaaactgcccgtctatctcagcagtccatagcgccaacgttgctccttccttcaggctgcttcttcctgtcggcaatcgctgtcgcgtaccagccaatacaccacaccgagcgcgaggataacggtcgcaaatgccagcgtgtgtaaggcatatgtttcgttcagatccagaatgatgacctttcggcagatggcaagcagcgcgatcacgatcacggaccggatctgcaccactgcctctcgacgttcagccaccaccagcaaggacttcttgaactccaacgcaatgatcacggtaaagatcatgccgaaaacggcctggaataccctgaaatcagacggatccagactgccggccaacaccaacccaaacaatatcttcaggctcagtgtccaaaccgccgcgaccacaacgatcgcgatcagggacgtcaggaagagcactacagcgtgctcaaaccattgataaagtgacaccaacctgaattggctcttcgtctcgtggagttcatccctaatcgacatgatcgccctcgctctcttcccttcgctggcctgacgcgcgttgtcgggccgagctgtcaatcgggatcgaacgggaccatatggcgggaagatattgtttcgccttgactgctgtcagcagatgttcggcgtccatggcacgccgcgctcatcatttttccgcgcttcaattgagaatcgtcaatgcacggccccttggcttttgcgatgatccaagtgcgaggtttcgcaccgtcgcagcccgtcccgggtttcctccctcgacttggaccgccagcacacagctgcgcggtcctttctttctccgcacgcatgaaagatcagccggcgcggggcgcagcccccctcgcgccgcatggacagcaaagcgaccatgatcgtcggcccgaagaacaggccgagcagcccgagagttgcacggatggcgtccacgaaagtgatcgacagactttctccttgcatccacaacgaaggcaccgatcgcgacacgagccgcggcccgcacccagctgcgcttgagactttggcccagcttggcttgacaaccatcatggcatctggcggccgctccacggtactggactgccagatcaggacaacgaactcggctagctcgagaccgccggcgtgctgatcgaggaatgccgcaagctggacgccaatctgctgataatgggtacttaaggccgttacgacatgcatgaattgctacccggcagtacgacgagccgcttgcttggtcgctcgccccagcccgctggtcgttgcccgtcaaggagccaacccatgcttgaccgaccccgccgtgccgcccttgccggaattcactcaggtcgcattcctcgcacgatgtatgcagcagccatggatcgctttggcgaacccgccgtactcatcgggcacgcgctgccggttccgacgattgatcctggcgaggttttgattgcgctcgatacatcaggagtcggaccatgggatatcgacgtgcgtcgcggacgctttgccggccgcaagccacacttcccgatggttccgggcgtcgatggcgccggtattgtcgtggctgtcggctctcgcgtgcgccgactgaaagttggcgacgaggtctattcgtacagctggcagaacccgaaaggcggcttctacgccgagtacgtggcagtacccgccaacaatggggcgccgatcccgaaacggctggaccttcagcacgcaggagctattgcgacaacaggtctgacggctctgcaaggtatcgacgatgccctgactttaagggcgggtgagacaatcatcattcatggcgcctcgggcggcgtcggcacgctggccgttcaatttgccaagctgcgtggcgctcgcgtatttgctacggcttccggaatagagggcgtcgaactggtgcgagagatgggtgctgacgcggtcgtcgacggcaagcgggtggtcgacatcgacaatcgcgcgcgcgcctttgcgcccaagggagttgataccgtgctcgctctcgccggcggcgacgcgctcgggcaatgcctcgatgcacttcggccaaacggaaaggtggctcacccaaacggcatcgagccagcgccaaggaagcgacgcggtatcacattgactcgatatgacgccgttgccggggtccgcgaattcgagcacctcaatgacgcagtgcaggcggcgaagctcaaggtcccgatcgcagagcgttattcgctggccgacgcccacaaggcgcacttacgtctcgaggcaggcaaggtccttggaaaaatcgtgctgacagttcacggcgcatgattgagatccttcccgaccaaggggtggcctggatccacatgggcacagcggcgtctgcttcacgcgctgcggcgtcaccttggctggttcgggcgctgcgggaacgccgcacggaccgaacgtaaagcctcgccattcgaatggtctcacagccagcaaagcttgatagctgtcaaggcacgtgctcgcggcagatcgctactatgacccgacctggaaaccggcggttatcttggagctcgacatggctaccacgaccttcaacagcaatgctgactttaacatcgactctgcctccgcgatgcttgccaagaattggtggctgttcctgttgcgaggcatcttcggaattgtcttcgggttgctcgctttgctcttccctggtcccaccatgctctcgctggtgttattgttctcggcctacatgttggtcgacggcatagcaggaatcatatccgctgttcgtgcgatgcgacggaaggatcaatggggactgttgatacttgaaggccttctcaatatcgccctcggcgttgccgcctttatctggcccggcctgacggtgtttgcctttgtcttcatggtcgccgcctgggcgatcgtctcgggcgcgctgatgatgagtgctggctttcgcctcaagcttgatcacggccgctggtggatggttttcggcgggctgttgtccgtggtttatggcgcgctgctggtcgctatgccgctgatcggggctgtggtgcttacgtggtggatgggagcttacgcgatggcctttggcattgcgctggtcgttctgtcctttaagttgcgcgcccgccaggaggagcagactggctcgctcgccgaggcggcgtgagcatcccttcgaagcatctcaaggcgcacttggtgcaccttccgaatgaaagaagtaaagaggcattggagcttccttttccattcaacagtcaacgagccgaacgatgtcttcatcgcgctgcggactgggcggcaacccgaagcagtccttccagttcgctttcgcaattattgacgaacgtcagggcgcgcaaaaaaaacttccgtatgctgtctgcaaccaacgctccccgagatcgcacgaacgacccgcagcgatttgttgctcgctaggagcgcgcaaaaccgacaggcatgctgcaaaacttccgttcaacgcaaaggactcaaaccatggccggcaatcgcgttctgacatttcaaggtcccatgaagctcgaagtcaaaaccattgactatccgaagctcgaggatccgcacggcagaaagatcgaacacggcgtgatcatcaagctggtgtcgaccaacatctgcggcagcgaccagcacatctatcacggtcgctttgaggctccgaaaggcatggtcatgggtcatgaaaataccggtgaggtcgtcgaggtcggccgcgacgtggaactcatcaagaagggagacctggtatcagttcccttcaacgtctcctgcggccgctgccgcaattgcaaggagcggcataccgatgtttgtgaaaattcttacgtcaacgacatcgtcgactgtggcgcttatgggttcaatctcggcggttggcaaggcggacaggccgattacatgctggtcccctatgccgactggaatttgctgaaattccccgacagagaccaagcgatggcgaagatcctggatctcactttgctctccgacatcctgccgaccggatatcatggctgcatcgaggccggcgttaggaccggctcgaccgtctacatcgcaggcgccgggccggtcggccgttgtgccgctgccagcgcccgtcttctcggagcgtcgtgcatcatcgtagcggacaggttgcgggagcggttgaacctcgtgaaggaatgcggatacgagaccgtcgatacgaccagcgcgacgccggtgcccgatcagatcgaggcgatccttggagagcgtgaagttgatgcgggcgtcgactgcgtcggcctggaagctcacggttacggcgaggaagaccgggaggagcactcggaagcgatcatcaatgttttgttcgacatcgtccgcgccggcggcgcgatgggtatcccgggcatttataccaatttggatcccgccgcgccgaagaccgccatggcaaaaaaaggtgaacttccgctcgccttcagcaaggcctggatcaagtcaccgaaactcaccgccggccaagcgcctgttatgcactacaatcgcgatctcatgatggcgatcctgtgggaccgcatgccgtatctgcgcaaagtggcaaacaccgagattatctcgttggaagacgctcccgcggcctacaagaccttcagcgacggctcgcccaagaagttcgttatcgatccgcacaatatgttgaaaaaggctgcctgaacgcgcgccgagcgctacgcctgtgagcgataggagtttgaatcatggcaagtgagacactcgacggcctgaaggttgcgattctgatcgaggatggattcgagcaagtcgaaatggtggagccgcgcaaggcgctcgaccaagccggcgccaaaaccagcatcgtgtcgccgaaagaccagcaagtccgtggctggaagttcacggagtggggcgacgcgttcccggtggacgttcccctcaatcaggccaaagcagaagacttcgacgcgctgttgctgccgggtggcgtcatcaatcccgacgcgcttcgcatcgagcctgcggcggttgccttcgcaaaagccttcttcgatgccggcaaaccggtcgcctcgatctgccacgggccatggaccatcatcgagaccggcgcagcacggggacgtcgtatgacgtcgtggccttcactcaggaccgacctgaaaaatgccggcgcggattgggtggatcaggaagcggttgtggacagaggcctggtcacgagccgcaagcccgatgatatcccgacagcattcaacaaagagatgatcaagctcttcgccgaagcgcgaggacgccgttctgctgcgtgacgccatacggagcaagctgattggcctcgtgcgcctgcgttttggttccttcggacgcgcggtcgcggcgatcggccaaggacgctgtatcttggcgattcctaaggcatccaccgccgcagcgcgggcggtggcacgcgcattaaactcgccgcaaagcaagtcgcaaggattcaacctgcatcaatcgggctgtggctgcgcgttagaaaagtccacgtcccagatggagcacattcaggcagcgatcgtatcagaaccagcgttcggatactttctaccagtttggtgctccagtgcgtcgcgatccacaattcggaccgttcgaatcccaatcagggcaatgataccgcgctgctgcaggtctgagaacgcgcggcatacagtctcgacggacacggcgaggtactcggcaagatcataccgcgtaatcggaagccgtatgtttccccgctgatctccgtagcgcctttcaagcaacagcaggaacgcactcaccttgtccgccgtcgtaacacccccgaggacgacaagttgctgtcgggtccgttccaacgattgaaaggtgatgtctctcagctctcttgcgaactggcgatcgcgctcgccgaagctctcgagccgcgctcccgaatagcccgcgagcacggtctctcccgtaatggcctcgatcggctcttctctctggctcttcccgacaaagaagaaatcatgcaccagcatcaagtccaggatctgccggcgtccgtcggtgcggatggtcgaccgccgtacggcgccggcaatcacgtagtaccaatgtcccgcgctacccttgtcttccggaacctgctggtcacggtttagcttgataattgcaaccggtccatcgagccccttcaacgcgtgcgactgtgcggcgagaatccttcgataatagtccgctgggtggattatcggcttcatttctctgtccttccttcttcagtcgcttacttcaagcactctcggcgggaggaacgatccgttcgcagacaatcaactatcagcagtacatccatgtaaatctgggaaattttcatacgtataaacacgtaacggcgcttgagccacatccagacgcgggctgccgcgaatgcgcggtcatgacggttggacagtcaaggcgttcacccgcactgccggattaagcgacccgcgaattgacaatggtcagcgcactcctggttcgaagagggtactcgctaagctaccagcagtcataggagcgagacatggaagcaaccatcccccgtcccctttcgaaactcatcagcagcgcagccactccgtgctggcagaacgcagcgacgcggaggagatattccggcttagcggcacttgccggaatagtggctgtcctcagcatcagccccgcacttccgcaggctggcgtggctctcgtcaaggtcgacttaagtgtcgtcgcgcagggctatcgcatgagcaagctgatcggcagcaccgtcatcaacgacaagaatgagaagatcggaagcctggacgatttgattgccgccaaagataagaaacaactcaacttcgcgattctacaggtcggcggcttcctcggcgcaggcggccatctggtcgcagtcccggttgaaagcctcgtcatcgacgataccggcagcaaggtcactctccccggcgcatccaaagaagagctgaagaagctgtcggaattccactaccgatcctcttgacagtcgcatcatatggcggtgtcaagatcaaccgacacgatcctggaccacaggcgcactcgcgaagtgaccggtgtctttcattcgcgacgtacgctcgatgacgcggcccaggatcttctgctgtcgggattcgatcgctccgacatcgacctcagcgcatctcccgacgaagtgcagcgacggatgaattacgctgtggttcctccagccgatctcgccgacatggcgaccacgccgagacagccctgctttggcgacgacgatttggctagcgccgaagccgtcgccagcggcgttctcggctgcattgcagcggttggctgcgctcttttcctgatgatcaaaggctatgagactatggcagtcgccatgtggtcgatcctgatcgggatcttcacaggagccatcgtcatcgtgcccatacaccgactactgcgccgcgagcgcgccaaaggcttggagccggcggcagaatgggatggtctcttgatctgggttcgggttcgcgcacctgagaaggaagctcaggcccaggagattctgatgcggcatggcgggcaggccgtgcacgttcatgaaatcgacctcgaaaagcggccggaagatctgccgctgcactcacttcgtcccgatccctggctgggtgacgaacgcctcgggcgaccgtaacgaggccgcgacacatgccacgctgcgtcatttctcccagcttttctcacttcgcccacggagatcatcttcggcgaccttcgtccagttcgctttcacaggatctcaagcgagaaagtcgagacggaagttgacggtcgtcatggcttgcttgctctcgtcacgcgcaagttgttccgaccggcgatgacggagcagcgccgagaataccactcgcaaatgccaggagccaatcatgaagtcagacagtgagatcgaacgtgacgtccgtgacgaactgacatggaaccctgacctcgatgccagtgacatagccgtttcggtcaaggacggcgttgtcacgcttgcaggtttcacacacagctacgccgatcggctagaggcagaattcgcggcgaagcgcgtagcgggcgttcgcgccatagccaatgacatcgaggttcggctgccatcgatcgatcagcgcccggatcccgatatcgcacgcgacgccgtctccgcgctcaagtcggagcttccgatctctcacgacaagataaaggccacggtcagagacggctggatcacactcgaaggttccgccgaatggcaatatcaaaagaccgcagctgagaatgcggtccgcaaggtcaaaggcgtcaagggcgtcatcaacgtgatcatggtcaagccgaaagtcgagccttccgagctcaagcagaagattcaggacgcgttcaagcgcaacgcggaagtcgacgccaatcggattcaggtcgaggccaacggcagcgaagtgatccttaaaggaacggtgcgctcctggatcgaacgcgaggaagctgagcgcgtcgcctggtcggcgcccggcgtgagcaaggtcgacgatcgcatcgtcgtgagcccctagaaccgagttgcatcgcaagctgaaaggagaaccaaatgaggttacgatcactcgtcccgtctcgtgatgcaggaatgctgatgcggcccgacttcggcctgttcggcctgcaccgggaaatcgaccggctgttcagcgagttttcgcagggcttgagcccaaacggacagcagctcgtgccgaacatcgaaatcgcggaaacggacaaagcgatcgaagtcaccgttgaaatgccggggctcgagcgcaaggacgtcgacatttccctcgaggatgacacgcttactattcgaggcgaaaagaaggtggagcagggcacaggcgacggcaagaacgacaagaatgtccagcacagcgaacgcagctacggcgtgttccttcgcgtgctgcagctgccgcccggcatcgatccttccttcgtccaggcgacgatgaccaacggcgtcctgaagatcacgattccgaagcccgcaaagccggagccgaagaaaatcgaagtcaaggaagctgcttgaccgttcacgcggcaagacgcccgagtctcctaacagcccagctcggcgcgtctcgccgctcgccgccaagagcgcgagacgccacaattttttggacggccgcagctgtcccaggattcaaacccgaaggaactgatcatggcaaaagcaatcggtatcgatctcggaaccacaaactcctgcgtggctgtcacggaaggtagcaaagccagggtcattgagaatgccgagggcggacgcaccacgccgtccatggttgccttcacggaggatggcgaagtcctggtcgggcagccggccaagcggcaaagtatcaccaaccccgagaacacgatctatgccatcaagcgactgatcggccgacgttacgacgacccgatcacagcaaaagacaagaccatggtgccctatcacatcgtgccgggcgacaacggcgacgcctgggtcgacgtccggggcaagaagtacagtccgagccagatcagcgctttcatcctcaccaagatgaaggaaaccgccgaagccacgcttggcagcgccgtcacacaggccgtcatcaccgtgcccgcctattttaacgacgcgcagcgccaggcaaccaaggatgccggccggatcgccgggctggaagtcctgcgcatcatcaatgagccgactgcggccgctctagcctacggcctcgacaagagaggcagcggcaagatcgtggtctatgacctcggtggcggcacgttcgatgtctcgatcctggaggtcggcgacggtgtgttcgaggtcaaggcaaccaacggcgacacctttctcggtggagaggatttcgacaagcggatcatcgactatctggcggacgagtttcgcaaggaaagcggaatcgaccttcgcaaagatcgtctcgccctgcaacggctcaaagatgccgcagagaaggccaagatcgaactctccagcgccacccagaccgacgtcaatctgcccttcatcactgcagatcaggctggaccgaaacatctcaatatcaagctgtcgcgcgccaagctcgaagcgctggtcgacgatctgatccagcgcaccatcgatccctgcaaggcagcgttgaaggacgccggcctgcagccatctgacatcaacgaagtcgtactggtcggcggccagacccgcatgccaaaggttcaggagaccgtgcagaagctgttcgggcgcgaacctcacaagggcgtcaatccggatgaagtggtcgcggtcggtgccgcgatccaggccggcgtgctccaaggcgacgtcaaggacgtcctgctgctcgacgtgacacccctgtcattgggcatcgagacgcttggcggcgtcatgacgaagctgatcgatcgcaacaccaccattccgaccaggaagagccaggtgttctcgacagcggaggacaatcaaaccgccgtcacgatccgggtcttccagggcgaacgtgagttggcggctgacaacaagctgcttggtcagttcgatctggtcggaatcccaccggcaccgcggggcgtgccgcagatcgaggtgaccttcgatattgatgccaacggtatcgtcaacgtatcggccaaggacaaggcgagtggcaaggagcagagtatccggatccaggcgtccggcggcctgaccgaagcggacatccagaggatggtcaaggaggccgaagcccatgcggacgaggacaagcggcgcaaggagctcatcgaaacccgcaatcaggccgacgcggtgatctacagcaccgagaaggcgctcaaggactccgagggaaagatcccttccgacgtcaagagggagattgagcaggcgatcgccgaggcaaggcaacggctgagcgccgaggacgtgacagcgattcagcaggcaactcagcggttgcagcagtcggcatcaaagatcggcgaagccttgaaccgcgcagcgtcccaaggcggggctcccggcggcggacaggcaggatcgcctgatagcagcgaagatgtcgtcgacgcggaattcgaagaggtcgatcccggcagccggaaggcttcctgaagtctttccaatccgggacaaacgccacaaatggagcaccacatgcccaccaagaccgtggatgatgtgctcggcgaggttctcgcgggcgagcacagggaaagcgaccaggcgcaggagaccagcgccgagcgcgaccgcctgatgcgtgcgcttgcggacgccgagaacacgaggcgcatggccgagcgtcgggtccaggacgcccgacaatatgcgatcgccgactttgcccgcgagctgctgcaggtggcggataatctgcgacgagccatcgacgctagctcgccggaccagggagtcaagaacgacgacggcctgctggccggagttgtcgccaccgatcggatcctgacacagatattgaaacgctttggtgtcgaggaaatcgacgctctaaatcggccattcgacccaatgaagcacgaagccgtgatggaaaccgatcggtccgatcagcctcccgggaacgtcgtggaccttttagagaatggctacatgcttcacgaccggctcttgcggccggcccgggtcgttgtagccagaccgcctaagccacaatcgccgccacccccgcaacaatgaagcgccggccgatcggtccggccgacgcgtaaacaggagctggtgttggctacagacccatatgcaacgctaggcgtcaagagagacgcggcacaggccgacattcaaaaggcctaccggcggcttgcgaagaagctgcaccctgatctcaatcccggcaacaaggcggcagaagagaaattcaagcacctatctgccgcctacatgcttttgagcgatccggaaaagcgcgcccgtttcgaccgcggtgagatcgatgcatcgggtaccgagcagcagccccggcaatactaccgcgatttcgctgatcgggaaggctggtcgggctacacgagtggggccggctttgccgatttcaatgacttcgccggcagcgaggatattctctccgagatctttgggcgcgccgggcgcaccacccggcgcggacgcggggttgacgcccgatatcacctggagctcaactttctcgatgccgtgaacggcggcaagcaatccattgtgctgccggacgaaactacgctcgaggtcaacattcctcccggcacgcgcgacggccagattctgcgcctgaaagccaagggtcgtcggggagccggagacaatccgccaggcgacgccctgatcgagatcaaggtcctgccgcacccctacttcgtccgcaaaggcgacgacattcatctggacctgccgatctcactgaaagagggcgtgctgggcgcgaaactcaaggtaccgaccgtgagcggcgctgtcgcggtctctgtacctaagtggtcgagttcgggccgggttctgcggatcaagggacgcggcgtgccgcgcgtcgatggcggcagaggggaccagtacgtcacgctgaaactggtgctgccgaaaaagccagacccggaactcgaacgctttgtgagtgagtggcagccttcggatagcccgagacagtcgatgcgagtgtgacaatgcagctccaggaatttgccgatcgatctcatctcgatccctccacgattgaagcctgggtgaatgcggaatggctggtggcgcatccaccaggacatcagttttccgatcaggatctcgcacgagcccacctcatccaggatctcaagcgcgacctggggatcaacgatgaaggtatcgcgctggccctgtatctgctggatgagctatacgggctgcgttgcctgctccgagacatccaggcgatgcggacgacagcttccgaacgcacacattgatgcgcttgcgattgatcggctatcatgagcttgcgcgttcgggcttcgccaatctccttgaaggccacggatcatgcagtcacttctctcaacacttaacgatgcagcgatgcactgggatgcctggccaaaaatgcttcgcaggctgatggatgaggcgggcgtggcgggtgcggcgctgattgtcacgaacaagacgacgggtacggtcgacgaagctgtcttttgcggtctcagtgccgaattcaaatcccgctacgtcgagcactacgccacgctcgatccatactcgccactcctggatgcacgctggatcatgctctccaaatgtcttccacagcccgttttgcggaaaagcgagtggtacaatgagtttgtgctgagctgcggtgttcgggacatcctcggaacgcggctcgcggacacggcaggtcattccgtcattcttggcgttcatcaacggatcggacgccatttttctcaagatgtcgagccactgatcgctacgatcacgggacccctcaggtatgcggcgcgctgccatctcgatcgccggaacggaggacagcaaattggcgatccgcaaacgacccccgcagaaggtggtcgcttcttttttcatattgagaacggcgtgaactacccggacgaatgcggtagcattctcctctcgccccacgacgccgcggaacgcggactgaccattgctcgagaactggcgcgggatggcgactggtccggcttttctgtcgttgtcaccgatgaatggggacgaacgatcgcgcgtgtaccgattcaatcttgacgacgcgtcgctcagtcgaacccggcaaatcgcccggctgaccgcgctgccgcccctgcacggtcatatctcgcgctcgtgacgcctttccggcactgatgccagccattctctccacatcgtgttggcgccggcaaaccatcctgcaatctcaagccggccaatacgggactcgatctgctcgtcagccaaccgtattgccaccagatcgccctgcaggaacgctgaaggcttccgtcgcctgcgcaacccacacctctcttctgcagcggcaagagcattgacgactgtcagcgcgatgcaccgatccgccgttatattagggtgtagagatccaaatatcttcggcccgctctcttaccgaaagctcgaagcatttaactccttcgactcgaggcaacatggttacagccaccacgcaagtccgtgcgctcaacggggtttcgaatgggaaagcgaaccccctgttccaaggatgtcggctcgggccgttcagcctgtcccatcgagtcgtcatggcgccattgacccgttctagagcacgacagccgggtaatgtgccgtctcagctcgcggcgtgttattacgcgcagcgtgcgtctgccgccctgatcataagcgaggctacccagatctcgatgcagggccagagttatgcctggacgccaggtatccatagccgcgaacaagtcgaagcctggcggcaggttacgaaggctgtgcacgaggctgatgggctgatcttcaaccaactttggcacgtcggtcgtatctcacatccggccctgcagcccgacaacatgctacccgtagcgccctcggcgatcacgcccgcgggcaaggccttcatcgaaaacgagcgcggcgaggcagaactggttccattcgtgcgtccgcgcgcgctgacttttgaggagatgccataccttatcaggcagtatgagcgcgcggcgcggaatgcggaggccgccgggttcgacggcatcgagattcatgcggccaacggctacctgctcgatcagttcatcgagagcagcacgaaccgacgcagtgacgcctatggcggcacagttcagaatcgagtgcggcttctgcttgaaatcacggaagccctgattcccattctcggggcggacaggataggcgtccggctctcacctctcggcaagatgaacgacatcagcgacgatgccccggaatcgacgttcggttacctcgccgagcagctctccggctacggtttggcctatctgcacatcgtcaacccggcgctcgagcagatgcagaacggcgagaagccggaaccgtatgcgctcagcatggcccgattgatccggaacaagtatcagggaacgctcatcgtggccggaggcttcaacgccgatagcgccacgcaatggttgcgcgatggccaggccgacttaatcgccttcggccgcaagttcattgccaaccccgatctgcccgaacggctgcgcgttggtgcaccattgaacgtggacaatcccaagacatactatggtggcggcgagaacggttacacggactacccttcactggaacaggaccgcggcgaaaaggcgaaggcctgcgtcgaccagcgttggcgatgatgcaacagaggaggagccggtctgcgtgagaagatcaatcgtccttacgtcgcacagtcaactccctgccatcgagccctctttgctagcgagccgtgtcagccgtggctgctagtgtggcgtgcggaagaacttagagttcaaacagagcgcgagcactatcatgggcagaagtttcaggtcgtatccttgtccggaatgcgcgaggatgatttggctggttcgcaagcgagccgccgatgccgggcgcccaggcgttacttgcaatgatccgatgcagcgacgggatctttggaatctcctcaatagcgaattgcagccgccacgtgagttccattggacatcggccgaaacggagagatcacaataatcacctgccgttcattcgaaccctcaggttcgcctcgatgcgccagtgccgcgaccgtcgcgccaataggttttgcgcaacaccttttgcctgaaaggtcgtcgcgagcattgaaaaggcgggcacctgctgctcggccgcggcatgcccaatcaccaggagcttctccactggtgcaaagcaccctgctcttcaactcatgaggctgcggtcgcggttgacggcgcatgtcggcgcaaccagtcgcgcaaagcctcgacaccgacggcgccggcccgctgagcgacgatgttgcctttgtggaacagcatcagggtcggaatgcttcgaatgtcgtagcgggccgccagctccgcttccgcctcggtgtcaaccttcagaaagcgaagctcgggttcgaactcgccggcggcgcgttcgaaggccggcgccatcgctttgcaaggcccgcaccatgccgcccaaaaatcgaccacaaccggaatatcgttgcattggatgttagcggcgaagctgcgggctgaaaccggcatcggatgtcccgtaaacaggtgctgccgacagtgtccgcatttcgcttggcgcgcgtccctccggtccggaatgcggttagttcttgtgcaatgcgggcaaacgatgtggcgggcgtctttgctcattctcgatctctccccaattagagcgacgccagaggttgcttgcgggccggagccggaaaggcatcatcgagttccgccagatcccgaggcgtcaggcgaacgtcgagcgctccacggttctcgcgcacatgctccggcttgcctgattggggtatcgcacacacgccatcctggcgcagcacccaggccagcgccacttgagccggcgtcgcgccgagacgcgccgcaatcgtcttgagcgtgacgtgatgcaacacacgaccctgctcgatcggcgaataggccatgatcggcaggccactgcgcaggcacgcgggcatgagatcaaactcgatgccgcggcgcgcgaggttgtagagcacctgatcggtcgcaacgtttgcaccgtgaggcaagtcgacgagcccctgcaggtcgccgacgtcaaaattactgacgccccaatatcggatcttacccgcgcccaccagggtgtcgaaggcatcgacggtctcttccagcggaaccgaccccggccaatgcagcagatagaggtcgatcttgtccacgccaagccgagccagacttcggttgcaggccgccatcgtgccgtgccgggtggcattctgaggcagcaccttgctcaccagaaaaatctcgtcacgccgtcccttgatcgcctcgccgacgacacgctcggcgccaccgtcggcgtacatttcggcggtatcgatcaggctcatgccgagatcgatgccgagacgcagcgcgttcacctcccccgttcgattcagcggattctcggccatgtgccaagtcccttggccgagccgcggaatttgctcgcctgaaggaagcacgactgtccgggtggtctccgtcagagccatgggggcactccctggtgtttcacattctcgcgcatgtagacgtggcggatttcgcaaacatcggacatcgccctatcgagatcgataagggagatcaccggcagatgaatccgacatcgacgtgcgaacctcagccgggtgcgaccgactacagcagcaactcgaagatccgtgaggcgaggtcccactgcttggtctgcgggtttttcaaatccggctcgatgatcttcaatgctcgtgcgaccgctacgccaagtcctccggcaaggtccggcagcattgcttcggtctcgtcgctgtagctgaattgcagcggcggccgatgagcgagacggtcgagaatcggcgccagctctatcgtctcattcaaccttctgaattgctcgatgcattcctggagcccagcggtgatcgggagattccagggctcgatcaggacgtcgccgccagctttggcgtcggcctcggcgcgcagtaaaaaccgataaatcctgtggtcgacgaactcctcgtaacgcttgaggtcagccttgtccaggttgagaccagccgcctcgcgaaatagtcgctggaactgtcgtatgccctctgggcgcggcggcggcattttttctggcggaagttgagcgatcatcgggtatgtttgccattgttcgccgccagtcgcattgacaggcgtcatatacgctgagctctttcgtcctcgaccgccattttatcatgctgcggcggcctgcaccggctctccgctccggctggtccgcgccgtctcgagaaacgcgtgaatctgctgcacaacggtggctccctcgccgatcgccgcgccaacgcgcttgacggatccgaaacgaacatcacccactgcaaatacacctgctatgttcgactcgagcgatgcgggcgggctcgcgccgtcggccgaaagaaggtcgtcagggggtacgttcgtgccggttcgcacaaaccccttgctgtcgcggctaacgttgcaatcgctcaaccactctgttgcgggctccgcaccgatgaacatgaagacgttgcggatcgttttctcaacttcgccgccggtcttgtcgcgccagcgggcccgttcgagttggccctgctcattgctcgacaatccgacgatttccgtgcaggtcagcaactctatattggctgtcgctgcgatcctgtcgatcagatattgcgacatggtctcggagaggctcgatcctcgcacaagcatccataccttcttggcatagcggctcagaaacacagccgcttgccctgcagaattgcctccgccgaccagcgccacttcctcgttccggcatagccgagcctcgaccggggaagcccaataccaaactccacgcccctcgaaactctccagattcggtatgtttggcctgcgatagcgcgcgccgctcgcgatcaccacgctcagcgcggtgacgctccgaccgtcggagagctcgatcgcgaatgggtagtgctcacaacgaaggttcgcgaccgtctcggggatgatcatctccacgccgaacttctgcgcctgcacataggcacgcccggccaacgcctggcctgaaattccggtcggaaatcccagatagttctcgatgcagctgctggcaccggcctgccccccaaacgcgcgggcatcgaacacgccgactgacaaaccttcggatgccgcataaacggcagccgcaagtcctcctggacctgcaccgacaatcgctacgtcgtatcggcgcccgtcgagatccggaggcaccatccccaaggcccgagccaagtcagcttcgctcggatttttcaggattgccccgttcggacagaccaccagcggcaattcacccgacttgcaaggatagtgcgtcaaaaacatttgcgcatccggatcctttgcggggtcgagaacctgatgcggataagcgttgcgcgctaaaaattccagcagacgcaccattccgggatggccatcgtgcccgatgagacaaggtcctccggcgcccgcctcgatgaggaacacccgtcgtaaaacaagggcacgcataatgcgctcgccgagttgcacgtcggcgatcagcaaagcgcgaagtctggctggcaaaaagagcagcgattcaacgggctcggttgcgcgcgcatcgaccagggcgggtccgccggagagttgcgcgacttcggcgacgaattcgcctgcacccagttcaacgattttctccgtccggccgggtcgatcgcgagcttcgatggatacccgaccggcaacgatgacgaacatgcccggcggaatctcgcccgtccggaaaagatattggttgacggcgtagtgtttgacctcgccgaatcggcgcatgcggtcgatctcgtcgggcgcgaacttgggaaacatgtgctcgcggcgggactcaagcatgccgttgctgttcgtctgtagaccagcggcaaccgtgttggatacgtcgtccatcccatacgcctttcaggaccacggcccttgcacggccgaagcgctccagggaaagcctcgtggcgcgtgctgcgcagtcagccactggtccgtcgtgaacgcctcgatcgcccaagagccattgaatcggccaatgccggaattcttctcgccgccaaacggacaggtcggcaagtcgatgacgggttggtcattgacatgagccataccaacctgcatttgctgggcaaaatgcacgccccggtgcaagtcgcgcgtgaacacggcgccgcttagtccaaaacttgtttcattggccacggccaaggcttcttcggcattgctgacccggaggaccggtgccagcgggccgaatatttcttcagctgcaagttccatctggttggtgacgttcacgaagacatgcggcggcaacacgaaaccgtccggcccgcctccgagcacctgtttgcagccgtcgtcgcgcgcgcggcgaatgcgtgccatcagcttctgaagctgcgagttgttgatgatcggaccaatcatggtatcgccatcgcggggatcgcctgctttcaacttcgccacccgctgcgtaaagcgatcgacgaacgtgtgatagacgcgctcctcgacaatgatgcggtttatagcgatgcagatctggccctggtgcagaaacttgccgaacactgcggcctcaacggcctgatccagatcggcgtccgcgagcacaacgaagggagcattgccaccgagttccagatcgacgcgcttgatgatcgacgccttcgccgcaagtgccgcgatcccgcggccgactggcgttgagccggtgaacgaaatgactcgtggaacgggatggctgacgaaagtgtcgccgatttcgctgccggcgccgacgatgacgctgaggagccccgccggcagacctgcctcctcgaagattttcgccaacaacaatccgcctgttacaggtgtatcgctcgagggtttcaccacaacggcgtttcctaccgcaagtgcaggtgcgatggtacgattgctcaggtggagcggccagttccaaggactgatcgccccgacaactccgaccggcttgcgccgcacctgattttccttacccgtgatgtcggacggaatgtagcggctttcgacagcatggggcaccgaggtcgtccacagcatgaccgtatgagtcacttcccactccaggttcgccttcagccgtgtgctgccggattccttgatcagccaatcgacgatttcgccacggcgcgcttccatcacgtctgccgcgcggcgaaatacctgcgcccgcgccgctggtgctgagacggcccactccacctgagccttggcacccgctgcaaacgccgcatcaagatcgtgacgatcggcctgcttgatttcgaggaggacatcgccggtaaaagggttcgtgtcgaccagcctgtgctctgcctggccatggcgccaactcccggcgatcggcagcaactcgaactgatcataaggttgcggatctctggttcgaactttggcgccatccggcactaaggtctcatgtcggtcggaactgcgggtggcactgcgcgcgaccatgtccatcttccttggcaggttggctttcacggccgacgatgacccgtcgagcggctctccaccttgacagccgtcaacccaaacgccggaaagcatcttgcatcgactgcttgtttacggctgggccacgccttcagagtcgccggccgtgcagcgcgctgtagtgcgtcaataaaacctggggatcggacctagttgaggcgtgggtcgatccgacaagtcaaacaacaattcgtcgacataacaccagccccagccttcgggcggatcataggcttcgatgatggggtgaccggttgcatgaaaatgcttcgtggcgtgtcgattgggtgactgatcacagcaaccgacatgaccgcaagttcggcagacgcgcaggtgcagccatggatcgcccagttgcaggcattcttcacacccaagagaatggggaataacatcgtgaattcctcccaagtgcctgcaatgttgtgccatgtcatcctgctcgatatctggttgctactttctgtctgatctcaattcccgcgcgttgcagagcctgccgtcctagtcctaccagtgctggtactcgcaagcgcagcccactatgcctgcgtccaggcaggccgttcagtgcaatctccgtttcggagatggcgcgttgaactgtgctatttccgcagtctgcggcgccttgccgttgaatgtcaggacattgccttccgccgaaatcgcgaccttgtcgccatccttcacctcgcctgcgaggatcatctctgccaggggatcctgcagatgcttttggatcacccgcttcagtggtcgagcgccgtacgcgggatcccagcccttggcagcgagccaatccctcgcatccgcatcgagcgtgagcgtgatcttgcgatcggcgagcagcttctgcagccgcgcgaactggatctcgacgatccggcccatctcgctcttctgcaagcgatggaacaggatgatctcgtcgacgcggttgaggaactcgggtctgaaatgcgcccgcacgacgcccatcacctggtcgcggaccgccccggtgtcctcgccttccggctgattcaccaggaattccgaaccgaggttcgaggtcatgatgatcagcgtgttgcggaagtcgacggtgcggccttggcgatcggtcagccggccgtcgtcgagcacctgcaaaaggacgttgaagatgtcaggatgcgccttctcgatctcgtcaaacagcacgacctgataaggccggcgccgcaccgcttcggtgagcgcgccgccctcgtcgtaaccgacatagcccggaggcgcgccgatcaaccgcgagaccgaatgcttctccatgtattcggacatgtcgaggcggaccatcgcagtctcgtcgtcgaacaggtactccgcaagagctttcgtcagctcggtcttgccgacgccggttggccccaggaacatgaacgagcccatcggccggttcgggtcctgcaggccagcgcgcgagcggcgtacggcggttgcgaccgcacgcacggcttcggcctggcccacgacgcgcttggcgagcgcatcttccatcttcaggagcttgtccttttcgccctccagcattttgtcgaccggcacgccggtccagcgcgagacgacctgcgcgacgtggttggcggtcacagcctcttccaccatctcgccggagttctccttggcctcgatatccgcaagctgcttctcgagttgcgggatccggccgtaggccagctcgccggctttctggaactcgccccggcgctgagcatctgcgagatcgacccgcagggcgtccagctctgacttcagtttttgggcgttggagagcttactcttttcagcgctccagcgcgccgtcagcgccgcggacttctcctcgagctcggccagctccttctgcagcgcctcgagacgcaacctagagcccgggtcgctttccttcttcagcgcctcctgctcgatcttgagccggatgatctcgcgatccagagaatccagctcctcgggcttg

SEQ ID NO: 19 - DNA, 154151 bp, Bradyrhizobium enterica
cggacgtcgtcgatgtcctggatcgcgacggtctcggtgatctccacgatcagccgctcgccgacgccgggatgcgcgcgcatcaaggattcgatggtggcccaccagtccggatccatcgtggtgtccggcgagatgttgaggctgagctgcacatcaggggccgcggcgagctcggcgatggcgagctccagcacgcgatgatcgaccagccggatcaggccgagccgctcggcgaccggcacgatgtcgggcgcgagcagcgcacggccgtcgtcctgctccatgcggaccaggcactcgtaaaacgacggctgccgcgagcgcgcatcgactaccggctcgaagccgatcacgatgcggcgctcgttcagcgcggtgacgatctcgtcggtgacgcggatgttgacgcggcgctgcgcgtcgcgctcgacattcggcttccacagcgcgaacgaaccggcgcggcggctcttggcggcatccagcgtctcctgggcgcgattgaccgcctcttccgccgacttcgcatggcgcgggatggtgacggcaccgatcgatgcggtcaccgataccgggccggacctggtcggcaccacctcgtcgcgcaccgcggcgaggaagcgctcggccgcgacgttggtatcgtcgacggtgcagttgcgcaggatcaggccgaacttgttgccggagaagcggccgagcatgtcgccgctgcgcagccgggcgcgaatccgcttcgccacctcggcgatgacggcgtccgcgacatcgaagccgaaagcgtcgttgacccgcgccagatgatcgatgccgatcagcatgaaggcacaggaagtgcggaagcgcgcgcactcctcgatgctctcggcgagcgaggcgaccagatgggtgcggttgagctcgcccgtcagcggatcgtgccgcgacagtttcaagagctgctcgtcgcgggcgtggcgttcattgttgacccggacgatgccctgcacccgcgacggcctgccgtcggggccggcaaaccagcagccggtctcctcgatccagatcaccggcgccgatgtgacgctccgtacgccatattcgatccggtaaggcaccggctccccgcttcgcgacggcgcggcgtggccgagcgcgtccacgcgaatgctgcgcgacggctcgatcagcttcgcgagctcggcgccgctcgccagcgccgcgaccgggatgtccgggaacaccgtcgccacattgtcgctccaggccatcgcgtcgctcgccaggtcccaagcgaaggtcgcttggccgagcgaggcgaggatgctggcagctggcgggacagggggcatcgaacatgtctcgatttgggacggcacccggtgattctccacagcctcaagatagtggttccggcgaatccaacgctaggagaagttgataaataatctggaaaccacgttttcgactgccgcggaacgaactggggatggcgggcatgacccttgccatgagggtgttgcagagggacgcaacgtcccaaactatgacgctccatcgggtcgcaggcgatgtttgatatcgatcagtcagaggtcctcgacggcgagttcaccgacactgccgccgtgaccagcacggcgctggtgccgctggccgtgaccacccattgggcgcccaagatcccgctgccgcacggggacccgtcatttctggctcacctgatcgcaaccgccgcgcacgagccgcagacgtgcgggctgcggcgtgggtcattggccgacgcacagaccgcctacggcccgcatatcgacgaacgccgcagcgtgacgcgacgcacccggcagatcatctagcaaaccatcgcgcgatcagcgggccttgaccggccggttgccgtgactgtcctgcggcacgccgcggcgcagcgacatgtgggaatggatgccgagccagcgcccgtcggcctggcgcgcgaggatgatcgtcgcccgccccggccggtcgaagcggctgccgtccggattgaagccggtgctggtccagggcgtgatcaccgtcgccatgccgccatcggcgctgatcagcacctccgtatgcgcgagatcgaaggcgaaatccgcggtgcggggccaaacgttgtcccactgcatctcggtccagcgcgtgcggccgtggatcagttcctgataggtgccgaacgagatgatgtccggatgccagaacgggcgggcggccgcatagtcgaccgccctgacgcaggcagcgaaccgttcgagccagtcgaagatcgattgcgttgtcgtcggatcggcgatcggaaggggcgcgtgttcgttcatggctccctccgaaaacacgctagcgttgcggcccgtccgatgacgggtggccgcccggctgcagatccggcgaggcgaccgtcggcttgggcgcagactgatcgagcagcacggattccgcgaccgatgtcgccggcgggaccggtgcaggcgccggagcggcgacaggcgcgggctcgggccgcggtgcaggctgcgcgacaggtgcaggctgtggtgcctcgggctgcgccttgctgacgctcggtgccggcgccgcaggcgcgaccaccgcacggcggcgggtgcgcagcgcaattccggaaatgaaatcgaccagcgccagcagcgtcagcaggcaataggtcgagttgccgaacttcggccacagcacgaattcggcggcggccgcgccgaacacgatcagcgacagcagatggtcggtgagatatttcgcgccggggcgcgcgcccttgatgacctcgagcagcaacagcagcacgccggcggcaagcagcatgtcgctgagcgtgatctgccactgttcgcccgacagcaaggtcagcctgatcagcgggtccgtgaaggacacgccgggcatcaggaaagcgatgatgttgtagaccgcgagcggaacgagcagcagcggaaaaccgaccatcggggcttgcgccttatttcagggagaaccagcaaagcggcgatggcacttgcctcgccgcggacgcgcgtcttgaccgcactcgttggccgaattcaggcgcagcgccgtttgattggagcacaaccttatcggaaaaccgctacgcacttttccgggtcatgctcgcgcctccgcggcgcggcagccgaagtccgatcaggactctttcttggccttcaggacctggcggcccttgtacatgccggtcttcaggtcgaggtggtgcggacggcgcagctcgccggagtccttgtcctcgacataggtcggggtcttgatcgcatcggccgaacggcgcatgccgcgacgcgacggcgaggtttttcttctgggaacggccatgacggtgtcctctagggtgttgcggaggcatcgtccgaaatacggacgtggctcagcgcttcgaagcgcaagctgcgatgccggtaaggccgcgcttatagaggaaggcactccgtaaagctagggccggagacagcaaaatgcgcccgaaatcgcgctcaatcgccgcgattgtcgcgccagcaccgcgtcacggtattggcccgggccatgtaggtgccggacagcctgcgcacccccggccccgggttccgggcgctccttttgagcggattcggcagaatcgccgccaaaagcgcggcttcccggggcgacagcgccgcggcggaccggccaaaggcatattgggcgccggcttcggcgccaaactgcccggctgggcccatttccgcgatgttcaggtagatttccaggatccgctgcttcggcagcacgaagtcgatccagagcgccagcggcagttccagccccttgcggatcacgctgcggccggaccacaggaacaggttcttggccacctgctgggtgatggtcgagccgccgcgggccacctcaccgtcctcggcatcgttgaccgcctcgcgcagcgcgccccaatcgacgccccggtgcttgcagaaatgggcatcctccgagctgaccacggaccgcggcaggtagggcgacatcgcgccgaaatcgacccaatgccgcgtgaccggggcgcctcgcagggtccgccacgccatcagggccgagaccggctgaccggtgcggtagaacggcgtcaccagatagggcagcaacagcaccgccagcaaaaccagcaataaaattcggacaatgcgcaaaacgagggtttccggggaggacctctccagcaacgatttggcacccgcccgccaggacacggccggcaccgtcagacgtctgtgggataattcacggtttttccagcacttttaaggcgcgaatccatagcagggtggaattgacgaagccgatctcatcaacgattgtccggccgaaaatcgatctggagcaattcttaatgacgaccggtactgcagagttttccaagcggctggaccagaccgcggaggataccgaagccctgctcgcgaaactgctgtccgacgcgaccgagagcgacgagatcgtgcgcccgaagcggctgatcgaggcgatgcgctattcaagcctcggcggcggcaagcggctgcggccgttcctggcggtcgagagcgccgcggtgttcggcatcccgcgcgaagccgcgctgctggtcggcgccgcgctggaatgcatccactgctactcgttgatccatgacgatctgccggcgatggacaattccgacctgcgccgcggccgcccgaccctgcacaaagcctatgacgacgccaccgcgatcctcgccggcgacgcgctgctgacgattgccttcgacatcatcacccgcgatgcgatccacaaggacgctcaggtgcgtctgctgctgacccgcgcgctggcccgcgcctccggcgtcggcggcatggccggcggccagatcctcgacctcgccggcgaaggccgtttcggcgaccgcgagccggtcgacgtcgcccgcgtgcagcagatgaagaccggcgcgctgctccgcttcggctgcatcgccggcgcgatcctcggccaggcctcgcagaaggaataccaggcgctcgacgattacggcaaagcgctcggcgaggccttccagatcgccgacgatctgctcgacgtcgagggtgacgcggccgcactcggcaagccggccggcgccgacgccgcactcggcaagaccaccttcgtcacccagctcggcatcgacggcgccaagcagcgcgtgcgcgacctcttggcgcgcgccgatgccgcactgtcggtgttcggcgatcggggcgacgtgctgcgcgccgcagcccgcttcgtcgccgagcgcaagaactagatcatgatgcgaatcgcatcatgatctaatctcttttctgagcatgatctccgcgcaaacgcgttgcgtttgtcgcgagggaaaaccggactccacttttccggatcatgctctaactggaaatcgcccgaaatgaacaaggaattcgacgaccgccttgttcgtttccgcaagctgccgatgccggtccgcgtggtggtgggccggccgcgcaccttcacttcgatcgtggtcggcatcgtcgtcgcgctgttgatgcccggctcgctacgcctcgtcacgcgcctgcttgccggctgggacgccttcgccgcgctctacctggtgctcgcctatctgatgatgctgcgctgtggcgtcgcccacatcaagcgcagcgccatcctgcaggacgacggccgtttcctgatcctgctgctgaccgcgttcggcgcgctggcgagcctgttggccatcgtgttcgagctcggcgcctccaagggcagcccggccggactggcggtggccatcgtcaccatcacgctgtcatgggccatggtgcacaccgcattcgcgctgcactacgcccatgagttctatcgcggcaagacccccggcggattgcagtttccaagcggcgatgcgcataccgacgtcgactattgggacttcgtctatttctcgttcgtgatcggcatgaccgcgcaggtctccgacgtcggcatcaccgacaagatcatccgccgcaccgcgaccgtgcacggcatcatctcgttcgtgttcaacaccgcgctgctggcgctgatggtgaacatcgcggcgagcttgatttagcgcgttatcaattggatcgaacggttcggccacggactctcgtcacctctccccgacggggagaggtcgatttgcgcagcaaatcgggtgaggggccgcggcgctaacgagagaccgcaatccctcacccggcgctgcgcgccgacctctcccaagggagaggtgaagtaccgctgcagctgcagctcaacctaatctccccgggcgctagttgcagacctcgacattgccgacgtttccgccggggccgccgccgccgcggtattcgagatggcagccgcgcctgaccggacggcacagataggcatcgcacgtgatctgcccgctgccgccgccttccgccctcgcacggccctgcgggcgcggaatgtcggcggacgggagctgcggctcgcgctgcgggcggaacgcacggtcctgctcgcggcgcgacgggcgctcgtcgccgtcgcgtttggcgaccggcttccgctcgcgccgtttttcgcattcattgtcgtcgttgaggaacgagccctcggcacacacgatcgtggtgcagcgatcgccatcggccctatagccgtgctcgcagaccagcggacagacgcgggactgcttcagcctgacggcatcgagcgtgtcgacactcgcggccttgacgtcgagtctggtgccggcatagcggttgaacagcgtcagcgagcgctgcgacgccgcgttccagtcgccatcgacggcgccggtcaggcagccgacgcggcgcaattcggtctgcaccgatttgactacgtcggcctcgggcgccccggtggcgagtgccgccacggtcgtggtcttctcaggcggagctgatggcgcggccgcagccggcgttgccgattgatcggcagcagccttgttcgccgcggcgcgatcggcgagcgcagcatccgcctgacgcctctgctcggcaaccgtggcctgctcctgcgcgacctgcttggcccgttcggcggcaagacgcgcggcttcggcagccttcgcgtcggcctcggccttcgcctgctgcgccttctgcgcgccctcggcggcaagccgtgcacgctcctgctcggccagacgcgccttctcggtggcggcgacgcgcgcgtcctcggtcgcgaatttatcgagctgcaacctggcgaggttggcgtagtagccattcggatactgcgcgaggaaagcattcatcgcgctcttgttgccgatctgcagcgcgagctcgtagtcgcgcctggcttccgactgcggcgtcggtgccgacatcggggacgcggcagcggcgacgggcgccggcttggctagtgccggcaccagcggcacgtcctcgccgccgagcgagccatagacgaacggctcctggcggttgttggtggtcttcagcacctcgtcgcggacatagccgaaggcgcgacggacatcgagaccgggcgtcggcaggaacttcgacagcgcgatcgtgaacgggctgttcttgccgtcgccgtcggccgccgtagacccggctttcgccgaataggcgatcagcacgttcggactggtcggctcgaccttggcgaggccctgcccgatcgcccgggtcgccagcgtccgcttcatggtcttggcgaacgggttgtcgcggcaggcatcgaggatcaccagccgcagcttccgcgccggctcgatcgcgaccaggatacggtcgagcgaaaacgcctcgtcgtagacgtcggtgtcgcgctccaggcgggcatcgaccgggatcaggtagttggcgccgtcgacctcgatgccgtggccggcgtaatagaccagcgcaatatcggcatcgcgggcgaggtcggcgaattcgcgcagtgcgcggcgggtctcgaccgccggcaggtccttgcggaagtcgaccgtgtcgaagccggcattcttcagcgtcgctgatatcaccgaggcatcgttgaccgggttggccagcggcgcggtgttccgatacgccgagttgccgagcaccagggccacgcgcttttccgcgaaggcgggctggcagacgatcagcagaacggccgcgacggcgagcagcaatcgattcaatttcaagaacccagacctgttcatggcgatactctggcggttttccagcatgcaggtccgaataccagaatcaagcgcggcattttgtgaggcgcctcacgatccgcgccggcgtcgaccatgtcaccctgactgttagtcgacgagacggaccgccggttcggatttggccgggcacgagatttggtgcacgatccggacaacaagaacagacgcacggaggacgtgatgcagggcaccagcgcggcggttccatccgccagacccggcaagatcggcggcatgatcggcagcatggcccgaaacctcctcgccctcgcgctgctggccggctgcgccgcgggctgcggcctggtcgacgccgtgttcgacggcttcaagcacgccaaggccgtggagaacgatctggttgcgatggtcggggtcaagccggcggtcgggttcaactggcacaatggccggctcacatcggtgaccgtcaccttccccagcctgctccaggacaagccgttgcagcaacttgccgtcgccgcgcgcgcggcggtcggcaaggagttcaagcagcgcgccgacgatgtcgtgctcgccttctcgctggggccgtccgagacgccggcggcacaagtcgaccaggctcaggacaagaacctgccttgagcggatttattccccgccatttattcctcaccttgcgtcacgtgctcctgatattgcggcaggtcgtccagtatcgcgtaccacggcgccttggagccgacgaagatatgggcggtcggccggatcgaaggcggctcgcgcagcgtacccatagtgacatgggcataggcgccgttacggacctgcgaatagagcagcgacccgcagcggccgcaatgcgcgtcgtgggtgatctcatcgccatagatcaggaggcggtcggcgccgcgtgtgacggtaaattttttgcgggcaatccccgcgaacggcttgaacgccgatcccgtggcgcgccggcagttcgagcagtggcaattcagcgcataggcaaacgcgtcggccacctcgtagcgcacgtcgccgcagaagcattcgccggtcaggatgatttcattcgaatttgcagatgcggtcacagcttgctcctcacgcagaattttgccgccggccatggcgcgatgcggcggttcgcggctagattgcagagccctttccattccgattgaatcggaacgggctcgcgatcctcgtttgacgcgttcctcacgcgaaccggtacccgcttcgctcgaaaacgctcctgtagaccaaaacccctgccgggaggaccaacccatgagccaagatcgatccaccgtcgagaacgtcgtgcaaacctatttcgacggcctctacgaaagcaatgccgacaagctcgccgaagcctttcatccaagcgccgatctgcgctgggtagagaagggcgagctgaaggtcctgaccgtgccggactggctcgctctggtgcgcaagcgcacgtcggcgaaggccgaaggcaagccgcgcgaggacttcatcgtcaccatcgaccgctccgacgacaacacggccttcatcaaggtgcgttgccagctgccgccgcgctacttcaccgactacctcgtcgccatgaagctcgccgacggctggcagatcgtctcgaagtcctaccgctacgacctcaaggactgaccgccgctcccgccgcgtttccacgacggctttgtgacatgcccaagcggcccggctccggccggaccgcattgactggcgctggtttccgggcgaattgagccgttatggaagccaagtttcagatctttctcagcttgctcggcgtgctggcgggaaccgccctggttgcgcggcggaccgatgtcgcgccggcgatcctgctgctcctggtcggcgtggtgctcgccttcgtgccgggcatgccgtcgctggaactgccgcccgagctcgtgctcctggtggtgctgccgccgctgatctattcggcgagcgtcgcgatgagctggcgcgaattcagggccaatctgcggccgatcatcctgctgtcggtcggctgcgtgatcttcactgccttcctggtcgcggcggcgacccactatctgatcggcctgccctggagcgtcggcttcctgctcggggcgatcgtcgcgccgccggacgtggtggcgccgctcgcaatcgcccgcaagctcggcatgccccgccgcatcctggtgatcctcgagggcgaggggctggccaatgacgcgaccgcgctgatcctctaccgcttcgcgctcgccgccatcacgacagggctgttctcgctgccgaaggcgaccggcaccttccttgtgatcgttgccggcgagatcgcgttcggcaccgcggtcggctggctcagcctgcgcgcccgccgcagagcccgggatccgcaggtcgagatcacgctgtccttgatcacgccctatctcgcctactggatccccgagcatttcggcggcagcggcgtgatcgcgaccgtcgcctgcgggctctatatgagctggaacggaccgctattgatctcggccgcgacgcgcctgcaaggcatcttcttctgggatttgatcatctacctgatcgagggcctgctgttcctgctgaccggcttccagatgcgctcgctgtacgagaagtcgaagtcgtttccgctgcacgacatcctgaccgccacggtgctggtcgcaatcatcgtgatcgtcgcgcgcttcctctgggtgtttcccggcacctatctgccgcgctggatcagccggcagctccgcgaccgcgatccgctgccgtcgtggcgggcggtgttcgtggttgccttcaccggcgtgcgcggcgcggtctcgctcgccgcggcactggcgctgccgctgacactcccgaatggcgacgcctttccgtatcgcgacctgatcctattcgtcgccttcggcgtgatcttcgtgacgctggtcgggctcggcctcaccctgccgccggtggtgcgctggctcggcctcgccaaggacggccgaagcgagcatatcgccgagcacgagcaggagatcgcggcgcggcgcgaggcgctgaacgccgcgctgaaatcgctcgatgcgatcaccgacgaccgcgagctctccgacgaggtggtcaagctcttgcgctcgcgccacgagatccgcgtcaaccagctgcccgacacgctcgaccccgaaaagcacgacgcctccgcggccggcaccgcgctgacccgggaactgatttcatccgagcgcaagttcatccacatgctgctgcgcgacggcaagatcaccgacgagaccaggcgccgcatcgagcgcgacctcgatctggaggaagcgagcctgtccaaccgcgagtatcgaaagataccgctgtagccccgctgtagcgcgccacctccacatggcgtcccagtgaaggccgggacgaccgaggaggttattctgccgccgtctgctttccgggaccgccgacgaagcctgcgggatcgccgaaccgctcgaccatcacggcggtgagatccttggccttgctggtgacgcaggcgccggagcgcaccgtgtagcgatcctggtgcgcggcatgcggcggcgcctcgccgttttgcagcgcgcgggccgcctccatcatcagcttgcggaaatgcatgatgccgagatcggtcgggccgagatgctcacgggtgcggtcggcgatcgggccctggctgtcctgcaccgcggcgtcctgctcggagacgcccttgatgccggtatagctcctggtccgctgcagcttgcgatcgatcagatagtcattcgacttgttgcgcagcggcacgtagttctcgtcgaccacggccatcacgccgttgccgttggcgtaaccgtcgcgctcggcgtcggtcagcggacgttcgggattccatgcataggtgtagatccagcaattggtgtcggtcaccggcacgaaggtctggccaaacatgttctcgcccggcatcgagctcggcgcgtagctgtggaacggcatcaggaactgggcaatacgccaatagatgttgtcgctgccggtgagccgcccgcccgcgaccgtcagccccgcgtcgtgcggattgatcttgatcaccggccgcgggtcctcggcgatccagcgcatgtgatcggtcgcgacccgcgtcagcgggttgacgaaatgcttcttgatgtcgaggatctcgttctcctccttctcgaaggagagatgcgcgaaggtgaaatgcgcggtgtcgatcgagccttccaccgcctgcacccagttgcagtcctgccatttcttggtgacgaagcggtgcgaggccggcagcagcgccatctccagcgcgggcaattccggcatctgatcgaccgggcccatataggcccagatcatctcgccccattcgcgcaccggataggacttgatgcggatcaggtccttggcgttgaggtccggatacgaggtcggcatgtcgacgcagcggccgtcggtgtcgaacttccagccgtgatagacgcagcggatgccgcattcctcgttgcggccgagccagagattggcgccgcggtgcgggcagtattgatcgatgacgccgaccacgcccctcgagtcgcggaaggcgagcagctcctcgcccatcacaacgatcttcttcggatcgctgtccggctccggcagctcttccgacagcagcaccggaatccagaaccggcgtagcaattcgcccatccccgttcccgatccggcttcggtgaggaacctgttgtcttcggcgcggagcatggcgtttccccgggttgttttttgattttcccggagcttggcgtagcggatgcggaacgtcaatgcgattggcggcgcggtcggcccagctcaaagcgggttcaaggcagtccggtcctccggctcacggcttcacataggcccatcccttctcctgcaactccatcacgcgcacgacgccggacttcacgacttccgcctgcttgatgatcggaatcgacttgttctcggccttctgcatcttctcctgggtattgccgcaggccttgaacgacacttcgggtgtactgagggccatttcctcgatgcgggccttcaccggcgaggtatcctcgcgcagcatgtgcaggcccgggccgaacgtgaccacctcgatctgcaccttctcgccgagccctttgtaatactcggtcacgttggttgcgttgttgagcgtgagattcatggcggccgcatcattgctgttcacctgcaggaccagacgatgctccttgcctttcggcgccaccggatcgtgcatgcgcgcatacgcggagcgcttgcgtatttcggccgcggttcgctgcctttctaatttatgaatgtcgctcgcccggtaagttgcaggctgctcgcccggtacccagtactttccaccttgctctgccgccgccaatggcgtggaagccagcacagcgatagcaaccatcgcaacaaatttcgcaacagattcaaaattgcacatcaaacatctccctctcgaaaatcggcaggcaaagttctcaattaccgggcctcgcgacggcgagcggccatttgcagaccgcggccatcctcgcgcgcatcgcgtccagccccgcgagcgagaatgttgcatcctgggcaaccccggcaccgcgggagaggtggacggcaagcaccgcgtgatcgggaagcgattgcagcaggcgaaccacatcgccggcgacggcaacgccggaaccgaccgccggcacggttgccgcggcctgcaccggcggaccgtcgttgatgcggtaggaaatcgcatagccgtcgccgcggcccgagatggcgggtcccgcgaacgacaattcggtccgcccgccacggcaccggatcgacagtttcacggacgaatcgaccgaatcggacgtcgtcgcagtggcgatgggtgaatagtcgaccggcgacgtcgtctcgctgaccgtccaattgttcgttttcgacacctcgcggcgagccggaacagcagcatgcgacagcttgtcgaggcactccaggcgcgcttcgcggtcgagctgagcacaggcgcgcagctgtgccatgggatctgtcatcccatcttccaccccttgcgccagggcaacgccgttgatgacggcgactgccacgacaagcggggcggaaagcctggtcattgcgatgcccgtgcggtcgacgactgccgatcgagccacgcctgcgcggcgggaaagcgcgcgaggccaggcacggtcgctccgagattgatcgatttccatttcggatcgaagccgggtccctgcagcttgtcgatccgcgagaacagatgatcgacgaaacgggcaacgcgctcgaagcggttggtgttggccgcccaattgaacgcgacgagggcggtcggcacggcgatcgtggcgacatgatcgccctgcttgatcagatttgggtaatcggccgcatcgagtgctgacggcagataatagtcctcgaacttgctgtcatacgggaccggcaggaacttgaagcccgcttcaaatcggcccttcacgaaggcatcgaccggcttcgaggtgatgaacacgacggccgccatctcgcccttccgcatctgatcgagcgcgacctggtgcggaatgaacgtcttgtcgatgtcgatgccgaggcgactgaagatcagcggacctgaataggctgccgccgtaccctggctgttgaagttcaccttcttgccggcgaggtcgctcaggctcttgatctccggacgaacgaagatgtgcagttcggacggaaacaggttcagcacgtaggtgatccgccgctggatatccggcacctggctcttgtattcctcgagcgcgtcggaattgatgatcgcagcgtcgatgccgcgcagatacagcagcgagttcaggttctccacgggcccccgcgtcaccaccggcaggacgtgcagattgtcgccgtcgtcgaccacgcgggccatctccgcggcgaggcggatcggcgcgccctcgagcaggccgccggcgagacccaccgtccaggcgttcatggccagggcttcgggcctcggctggggcggctcggcccggaccacgcgcgccttgtgaggctgggcattttgcggccgcgcatccgtcggcgacggctgcagcgccgggagcaacgacggcacggctgcgagcaggaacagcaggcgcaatcgggtagaccttctcatcgaccagctcctttgcacgacatcacgtcagcgcgttcgcccttgctgcgaggatcgttcgatcaacgcagcgcctcgaatcacgcctttgcctcctcgattccaccggcctccgcaccgcattgctgttctgtccggcaggaccggcgtcattcgcgcggtttgtccttgcttgtgcaaattgcagggaattgctggcgatgccgttgggtcgcgctgcgacgccggaacgcggcacatccggacaacacgtcaccgccagggctgctgcgaaccatcggggagccgtggagcgcatcctcctcggaggaactagcccttgatccgatttgacgcgcgcatcggtgctctcacaaggcgcgttcccgacatcatttcgaatgacggtgctctcatgtgtccgcacgttcagtatcacctgcctcatggtgatatcgcccattctgatccggcatcatacggcgcaggggctaacggatactatgacccgcaaggattacccctgataccgcgcagccttgagccaggccgaagcattgagctcagccgcagtcggcgtcacggcgtaaggcaggtgctgcgcttataccggccgttcgcccttcacggtcacgcgggtgccggagcgggtgtgcggccagtaatcccacatcgcgcggtgctgggcgcagcggttgtcccagaacgcaattgcgttctcggtccagcggaagcggcactggaacagcgggttctcggcgtgctggtagagataggccagcatcgcatcgctctcgtcgcgcgggatgccgacgatgaagcgggtgaagccgcgattgacgtagagcgatttctttcccgtcaccggatgggtgcgcaccaccggatgctcggcgcggggatattcccgcttgtcggcgacgccgtaattggcgtacaggccgcgataagtctgctcgccgtcatgcagcgcggtcagcccgtcgagataggccttcatacggtccgacagcgcctcataggcggcgtacatgttggcgaacagcgtgtcgccgccgcgcggcgggcattgcttgatgtagaggatcgagcccatcggcggctcgagatcgcaggacacgtcgctgtgccagccttcgccattggcgcgcggcgaatccttgtcggcatagattttcatcagcgccggatcgccctcgttcggcgcggccggatggacatgcagctcgccgaacttgcggccgaaggcgaggtgctgctcggggctgatgtgctgatcgcggaagaagatgacgaggttttcggcgagcgcacgatggatctcgtccatctggcggttggagcgcgcatcgtcgccgaccagcctggcgatatcgacaccggagatctccgcgccgatgatcggcgtcagcttctcgacgccgatggtctcatagggctcggattggtcggcgagatggcgatagcgcgggccttgcttgccggacaatgagctcatgggcggtctcccgatggtcttgaaggggagcatggtagcgctcatcgacggaagcgcaatcgcacggcaaacatacctgtcgtcccggacaagcgcagcgaagcggagcgcagatccgcgacccggaaccacgggactgggttttgcgaagactcgcaattcgcatcttgcgccacgacgacggcctgtggctatgggtccctgctttcgcagggacgacaccgaggatcggctacgagcggaatgaactactcagcggcgcccgccggctccggcaccttggcgcccgcgccatacttctggtcgatatagtcgatcaccagcgccttgaagtcggcggcgatgccgggaccgcgcagggtgcggaacttcttgccgtcgacaaacacaggcgcagccggtgcttcgccggtgccgggcagcgagatgccgatattggcgtgcttggattcgccggggccgttgacgatgcagcccatcaccgcgacgttgagctgctcgacaccgggatacttggtcttccaggccggcatctcgtcgcggatgaaatcctggatcgagcgcgccagctcctggaacgtggtcgaggtggtgcggccgcaacccgggcaggccgcaaccagcggcacgaaggtgcggaagcccatcgtctgcagcagttcctgcgcgacctgcacttccagcgtgcggtcaccgcctggctccggcgtcagcgagatgcggatggtgtcgccgatgccctgctgcagcaggataccgagcgcggccgacgacgccacgatgcccttcgagcccatgccggcttcggtgaggccgagatggatcgcataatcggagcggcgcacgacttcctgatagaccgcgatcaggtcctgcacggcggagaccttcgccgacaggatgatcttgttcttcggcatgccgagctcttgcgcgcgggccgccgatagcagcgccgactgcaccatcgcctcacgcgtcaccgcgcgggcgtcgcgcgggttcggcgacgcggtgttctcgtccatcagcttggtgagcagctcctggtcgagcgagccccaattggcgccgatgcgcaccggcttgtcgttcttgttcgcgatctcgatgatgtcggcgaactgggtgtcgcgcttgttcttgaagccgacattgccgggattgatgcggtacttgtcgagcgcctcggcacaggccggatactcggcgagcagcttgtggccgatatagtggaagtcaccgatcaggggcgtcgtgatgccgcgcttgcgcaggccgtcacggatgtgcggcaccgcggctgccgcttcctcgcggtcgacggtgatgcgcaccatctcggagccggcgcgggagagcgcggcgacctgggcgatggtgccgtcgatatcggcggtgtcggtgttggtcatcgactgcacgacgatcggcgcaccgccgccgacggcaacattgccgaccatgacctgcgtggtttggtgccgcggcgcgggaccggcgacgtcgtcttgcggcaaaatctcgggcttgttcatggcgtctcgaatatcaggttttggtgacattcaccaagggggcgatgggcctcgcgcatagcaggccaagcggtgatgtttcggagtgaattcaacagcttatgccgccgattgaggccaaacgcaagccatgcagcggcgtcctgcatacctaggctatattggaccgaattggggtgaatcaaagggcaaagtgacagcttttcatgtgacccggcgcacttctttggtttgagcatgaccttttcgaaaaaccggtagccactttttcgggtcatgctctagcatccagttaagggcatatcgggaggacgtgaaaatggccgactatggcgagctgatcaccacggcggaactcgccgagatcctgacccggcccgagctgcggctgttcgactgcacgacctatctggagccggcgcctgccggcagcaacattccctatatcgtcgtctcgggccgccagaccttcgaggcgggccacatcccgggcgccaatttcctcgatctgcaggccgaattctccgatgcccgtaccgagctgcgcttcatgatgccaccgacggcgcagctcgaggcggcgttcggccggcacggcatctcggctagcagccgcgtcgtgctctattcgatcgggactgcgatgtgggcgacacgtttctggtggatgctgcgttcgctgggcttcgaaggcgccgcggtgctcgacggcggcatcgacaaatggaccgccgagggacgcgatatcgagaccgggctcgccggcggctatccgccagcgacgtttccggcgcggccgaaagacggcctattcatcgataagcacgacgtgctcgccgcgaccaccgagagcgacaccgtgatcgtcaacgcgcttggcccgcaattctacaagggactggagccgagccgctacggccggcccggccgcatccccggtagcgtcagcgtgccggcggcgtcgctgatcgacgccaagcacaagacgttcgtgccgctcgaagaggccgaggcaaccttcgccgcgcagggcatcaccaaagacaagcgcgtcatcgcctattgcggcggcggcatctccgcgaccatcgacctcttccagctgcatcggctcggctacgacaatctcacgctctatgacggctcgatgggcgaatgggcgaaggatgcggcgctgccgatcgaagtggggtagcggagggggtggtgcctcctccttcgtcgtcctggcgaaagccaggactcataaccaccgaatttgcttgtgaacgggaacgcggccccagcgtcgcgcgacaaccgacatttggggtaatgggtcctggctttcgccaggacgacactgaatgtcgggcgcgctgacgaggcacacatccgtgtttttggatgtcggggaagctatcgtaggacgacactttttcctcatcgtcattccggggcgtgcgaagcacgagcccggaatccatcgggccgcatcgttcgtggatgaatggattccgggctctcgcttcgcgagccccggaatgacgggagaggttacgccggcacgttcgggtcgggcgtcagcttcgggtcgggcttgttgaccagatagagccccgcgatcaccagcagcgcggcgacgccgaacaccggggtcagcgtgtcgtgcatgatgaaataggctgcgacgacgccgaacagcggggtgatgaaggtgaaggccgacagcttgctcgccgaataggtcttcaccatcgcaaaccagatcacgaaggtgcagccgaccacccagaccgcctgataggcgagcagcgagatcgacaatgcgctcggcacgtgctcgatgcgctcgcctgcgatccaggcggcaagcccgaggatcgggatcgagattgcaacctgatagccgagcgccttctcaggcgcggccttgcgcaactgcgtgcccttggcgaccagcgtggtcgccgcccacaacgcgccgcctgcgaccaccatcaggtccccgagcagcaccttggcatcgacattgggctgcggcacgccgatcgcaagcgcgacgccggcaaagctcagcgccagcccgctccactgcacggtcgagaggcgctcgccgaggaactggtgcgagccgagcgcgacgaagaacggcgcggtgtagaggaagacagaggcgcgcgaggccgaggtgaagacgaggccggtgaagatcagcacgaattcgcagccgaacatcagcccggcgatgatgccgggcacgagcgtgccgtcgcgctcgaagaatttgacgccgcgcagatggccgacgatcagcatcaccggcagcgcgcccgaggaacggatcagcgcctgcagcatcggcggcacgtcgggcagcgcgagcttgaccgcgagctggttgaagccccagctcacgcacagcatcagcatcaatgcgatggcgccgggcggcagcccgtgcccgacgctgacgggcctcgtgccgctggcggagatcgcttgggtcgacatgtttcctcgcaggccggcttgctgccgtgttgttgtttaggaggtgctcgttgtcatctcacctctcccgcttgcgggcgaggtcggcgcgtagcggcgggcgggggctctctccgccatgcgactcgtggagagagcccccaccccagccctcccccgcaagcgggagagggggcacagcgccttcgtggtcagcgtttgcgtgaattgcatcagcgcatcacgtcttctggcaatgcgcgcaggtgccggcgatctcgacgaccgagagcttcgggatgaaacccgaggcgcgcgccgccgcagtcaggctttgcgcgacgggcgcggccggaatctcgccgaccgagccgcaatggtcgcagatcaggaacgcgaccatcgaggtctcgtcatggtcgtgcgcgcaggcgaggaaggcgttgcggctctcgatgcgatgcacgagaccgttttccatcaggaagtcgagcgcccgatagacggtaatcggtgccggccgcggcattgtcttggccagttcgtcgatcacctcataggcgccgagcgggcgatggctcgacaatagcgcctgcagcacctgacgccggatcggggtgaatttctgcccacggcgcgcacagacctgctcggcatgcgccatcgcgtccgcggcgcagcggccgtgatcgtggtcgggggcaggaaatgtcggcttggccaggctcattgcctcgatatgtagcattttcgcgcccgttcccatagcccggccccacccaataccccgccgctatgcagccatgtgtgcaatgcggagcagccctccgttaacccgacgtgcaggattaataagcaagcttattatatgccaagcttatggaggcacgatcgatgcgcggttccgtggacacggagttcatgtttacgctgggcgagctgttccggctgatccgcgtctatgccgacaaggaggccgcgcgctacggcatcacccgcgcgcaatgggccgttctgtccaaggtggaacgccaggagggattgaagcagaccgagctcgccgagctgctggagatgcagccaatcacattgacgcggctgatcgacaagctctgcgacaatggctggatcgagcgccgcagcgacgagaacgaccgccgcgtcaaccgcctctatctgaagaaggccgcgcgcccgttgctcgggaagctcgctggcctgcgctccgaactcaccgcgaccgcgctcgagggcatcagccccgcagacgcgcatcgcctgctcactcaattggaatcgatcaaggaaaacgttcgcaatgccatccaaagcccagccggcgagccctcccgaaaagagcagcgctatggctgaacccatcctcaaactggcccccgagcagaagggcaatccgggcgagcctgcgccggccggcaaggccagccgcgcgccgcaccgtcgcctgatggcgggcctgcggcgctatcgccgcgtgctgctgctagtcgtgctgccgaccgttgcggtgatcgccggcggcgtgttctatctcaatggcgggcgctatgtcggcaccgacgacgcctatgtcggcgcgcagaaggtgctgatcacgccggagatctccggcaagatcgacaagatcgtcgtcaaggaaggccagcacgtcaagaagggcgacgagctgttcgagatcgatccggtgccgttccgcctcgcggtggaccaggccaaggcggcgctcgaccagacaaggaccacctatgacaacctggtcgacaacatcaagatcaacaccaggatgctggaatttgcccagcagagcatcgaattgaagaagcgcgacgtcgatcgcaaatcgacactcgccaagcagaatttcggctcgcagctcgatctcgataacgccgccaacgcgcaagtcaccgccgagagcctcgcgcaatacgtcaagcagcagatatccaaggacaagacgcagctgctcggcgatgtcgagctgccgatcgagaagttcccgccctacgcccaggccaaggccaagctcgacgacgcgcagcgcaatctcgaccacaccgtgctgcgggcgccgatggacggcgtcgcgacccaggtcgaccagatccagctcggccgcttcgtcaccgcgggcgcgccggtgttctcggtgatcgacgtcgatcatccctgggtcgacgccaatccgaaggaaagcgatttcacctatgtcgcggtcggccagccggtgacgctcgacgtcgacgcgttcccgaaccacgaattcaagggcaagatcggctcgctgtcgcccggcaccggcgcgcagtttgcgatcctgccgccgcagaacgccaccggcaatttcgtcaaggtggtgcagcgcgtgccggtgcggatctatttcgacgagaacgatccgttcgtgaagaagctgaaggccggcatgagcgtctacgcgacgatcgacaccaaccaccgccgcacgctggcgggcctgctcggactgcggtcggctgccgcgcacccggaccacgaggactgagatggagcaagatcgaagcccagcgcgccacctctccccttgtgggagaggtcggattgcatcgccagatgcaatccgggtgaggggttacgctctctcgtgggacctgatccccctcacccgcgccttcggcgcgacctctccccgatggggagaggtggattcccgctgcaatcagcgaacagggctgaactgaatgaatgcaccgtcaccatcagccgtgcccggcatgcgccggaacatggtgacgatctgcgcgatgactgcgacgatcatgcaggcgctcgacaccacgatcgccaacgttgcgctgccctatatgcagggttcgctgtcggcctcgcaggaccagatcaactgggtcctgacctcctacatcgtcgcggccgcgatcatgaccgcgccggtcggctggatcgccaaccgctacggccgcaagcggatcttcatcatctgctcggccggcttcaccatcgcctcggtgctgtgcggcctggcgcaggacatcaaccagatggtgctgttccgcctgttgcagggcgtgttcggcgcggcgctggtgccgctgtcgcaggcggtgatgctcgactcctatgcgctgcatgagcgcgccaaggcgatgtcgatctggggcatgggcgtgatgatgggcccgatcatgggaccgtcgctcggcgcctggctgaccgagacctattcctggcactgggtgttcttcgtcaatctgccgttcggcttcttcacggtgctcggcctgatcattttcatggacgagaccaagcaggacctcaatctgcgcttcgactggttcggcttcggcgcgctcgcggtcgcgatcggcgcgctgcagctcgcgctcgaccgcggcgagcagctcggctggctggaatccaacgagatcatgatcgagttcatcgtctcggcgatcggcttctactatttcttcgcccattcgctgaccaccagccggccgttcatccagttcgcgctgttcaaggacaagaacttcctcggtggctgcgtgttcatgacggtgatggggctcgtgctgtattcgaccatggcgctgtcctcgccctacctgcagaacgtggtcggctacccgatcatcaccgcgggcctgctgctggcgagccgcggcttcggcaccttcgtcgcgatgatgctggtcggccgcctgatgcgttacatcgaggcgcgcacgctgatcatctcgggcctcgggctgaccgcggcatcattgttccagatgaccggctggaccgacatgacgcaggcgaacgagatcatcatcgtcagcgtcgtccagggcttcggcttcggcctcgtgttcgtgccgctgtcgacggtagcgttcctgacgctgccgggccagctgcgcaccgacggcacctcgatgctgacgctgctgcgcaacgtcgcgagttcggtcggcatctcgatcgtgatcgcgcagctcactgaagcggggcggcggatctacgccaagctctccgagcagatcaacccgttcaaccacgcgctgcagatgcccgacgtatcgggcatgatcaacctcaacaccgatgccggccgcgcgatggccgaccggatggtggcggcacagtcgcagatcatcgcgttctcgcacgactaccagctggtgatgatcttcatcctggtctcgatcccgctcgcgctgatgatcggctcgaccaaggccgcgctgcgcgcgcaatcggcgccgccggaccatgccgcggtgatggagtaggtttctcctcgtcattccgcggctcgcgaagcgagaccccggaatccatacatcagcaaggtttgcggcccaatggattccgggctcgtgcttcgcacgccccggaatgacgagggaaagagccacactcaccccctcccaaagcgcaagacactgcgcccgcaatcgcgttgactttccgacctcccctcccaatactccgcaaaaaacaaatgcccgtcacacaaatggcggattcaggggaggacgcgatgccgacttcacgcaggacgctgctgaagacttcagcggctgccgccgctgctttcagcttcgattggacacgcgcgcaggcccaggccgagacggtccggatcggcgtgatctacgacctcaccggtccgttcgccgccggcggctcggtcgcctcctcgatcggcacccagatcgcgatcgatctcgtgaacgagaagggcggcatcggcggcaagtacaagatcgccccggtcaatgtcgattcccagagcaagcctgatgtcgcgatcaacgaggccaaccggctgatcgaccaggagaaggtcgacatcctcaacggcgtgttcgcgagttcgcacgcggtgccgctcgcagccaaggtcgagcagcagaagcgcatcctgtggatcacgaccgcggtctcgaccgccgtgttcaaggacaagaacctgcaatacgtgtttcgcgcgcagatccattccgatcaatacggccaggccttcggcggcttcctcggcgagcacgccaaggccaggctcggcatggagccgaaggacgtcaaggtcgcgctgatccatgaagacggcccctacggcgtcggtgtcgccgccgccgacgagatgttcgccaaggaagccgggctccaggtggtgctcaaggaaggctattcggcctccgcgcccgacctgtcggtgctggtgaccaagctgaaacgcgccaaggccgacatcatctcgcatgccggctacaaccccgatatcacgctgttcctgcgccaggcgcgcgagagcgggctgaagttcaagatgctgttcggcgccggcgccggctacagccagctcgacaagttgcgcgcgacgttcggcgccgacatcgacaatttctgcaacatcgatcccgtgccggcgcagctgctcgatcccgccaagctggcgccgggcgtcggcgatctcaccaagaccatggtcgcgcgctatcgcgagaagaccagcgccaccgaagtgccgccgcactgctcgatgggcttcaaccagacctggatcctgctcaacaatgttctgccggtcgccaaggagaaatatggcggcttcgatcccgaggcgatccgcaaggccgcgctcgacgtcgacatcccgccgggcggcaccatccagggctatggcgtgaaattctatccgccgggcgcgccgatggccggccagaacgagcgctccacccctgtcgtgatgcagaacgccggcgagcgcatcaccgtggtgtggccgaccaatatccggacgcaagacccggtgttcccgctgccgaagggatcggtgtacggggcgtagtgcttggagaactgcggcggcagcggcggtgcaccctctccccttgtgggagagggtggcttcgatgcggagcatcgaagccgggtgaggggtttctctccgcgaactctttgacaattgagctcgcggtggcaacccctcatccggcgcgctacgcgtgccaccttctcccacaaggggagaagggaagaactgcgcgcggtcagaacgtcacccgcctgccctcgtcggcggcccaatagccggcgtagttcaccttggtcgtctcgaacgccagtgcgagatcggcgagcggctgccggccggtcgccacgcactccatgaagtcctggatctcctgcaaatagccgcgggtccattcctcctcgaggcagatatattgccagccggtctttcgatcgaccttctcggtgatgtagacgttcgcgagcttctcctcgctggtctggtaactcgtcagatgcgtgttcggcgtgatgtttgcaaacagcgagccccctgacgtgtaggtctcgatcaaattgcgcacgccgcccatgatcatgtcgccggagaacaccgtcgccttggtgccgtcggagaaggtcgcggtcagcgtgccccaatcctcgacgtcgaccggattggccttgatgtaggtgcgctcctccggcttgagcaaggctgtgacattgccgacgtcgcaggtgacgctggcgacatcgatggtctcgccgcgggctttcgcctcgacctgcttgaggtagagcacagccgatagcggatggcagcccatccggatcagcgagccgccgccggtcatcgcccattgcgcggcatgcgccgcgtgcgagccggaatggctctcctcgcccttcatgaacaggatcttgtcgcccgtcgcgcggatgatctccgcggtcttggtgatcgccggcgcgtagatccagtcctcggcatacatgaagagccgtccagttcgctcgattgcggcgcgggtttgctccatctcctccatgacgcgctggtacatcagcgcctttggcacgtgtttgccgatcggcgccttgtcgccgtcacggccgaaatagccgctgaacggtttttcgcagatcacgtgcttgccggcctgcatcgcctcgacaatcatcgcggcatgcaaattgggcggcgtgcagatgtcgatgacgtcgagctcgcggtcggcaaccagctcggcgaagctgcgataggcattcgaaatttgatgcttgcgggcgaacgcattgacgtgatcgccgcgcgccgccaccgcccttacctcgacctcgacgccatagacgcgccggtaagcgtacatatgcagttccgagacgaagccgcagccagccagaccgatcttgatttttgtcatttgaggatgcctctgaggtcgcgggatggcacccatcatagccgagcagcgtggccggtcgatgcatgcggcggcagaaaagcgcccaccgccgtccgatcattgcgcgagcttggcgacgcccatcttcgagagcagggtcaggttgtcctcgatatgccaattgtcggtaacacggccgccggtgaccttgagcagatcggtagcgatgaaatcgatcggctggccgctgcccttggccgtgccgaagctgccggtgaaatgaccgcggaactgcatgtgcacggtgacgtagtcaccggccacgatcatcttgaccacttcgaccgagaggtccggcacggcggaacgaaaattcttcgaggcaaaagccgggccttgtggcccctgcgggcggccggccggcagggtgtgatcgatgaagttatcggatatcgcggccttgagcacagcctcgtcgccgctattccagaactggtagaacgccttcgcgacggcgacagtggcatcgcgctcggccgctggaaccgcggtcgcgacgacgaggtcgtcgatcgtcacctcggccgcacgtgctggcgccgcgagcagcacgcccattgcaatcgctgtggcggccagaacatcacgcattgtttttgctcctcgttgcggcctcgcgctcgcgaaacaccagttcgagcaggatgcccgtcggcgtgcggacgaacaaccggcgctcgccgagctccggcagctccatggtggaatagggaatggcgagtgcctcgatcttgtgacgataggcctcatagccttcgaggcggaagccgacatggtcgatggtttcgccgcgtggatcgttgcgggtgccctcacccgggaccagatgcaccaccggctcgccgtcggcataaagccagtagccggggaaggcgaagccggggcgatagcccggcttcacgtccagcagattttcgaggaaggcacgggtgccttccagatccttggtacgcagggtgacgtggtcgagcatcgatgcctcccgcgatcaggccgtcggtccgggcagaccggtcacgccgggcgcgccgcgctggatcaccggcgtattggcgcgattggcgagcgcataacgggcgatctcgtccttgcgtgcgaaccagacgtcgcccttgctcttggcgtaggacaggaagcgatcgagcacccgcgcacggccggcgtggccggagatacgatcgtgcaggctgatcaccatcatccgccggcgcttcgcgccctcctcatacagctggtcgaactcgtccttcagcgcctgctcataagcggccggattccatccctggaacgggaaggagacgatgtcgttcatgtgcatcgtgtagggcacggtgacgaaatccttgccgcgcaccggcacgatgaaggattcgtcatggctcggctcgtcgatgtgatagaggaagccgagatcctgcaacgtctccaggatgtgcacggagttgcgcatccaatacgcgttccagccgatcggcgtttgtcccgtgatcttctggatcgtctcgacgctgtcggcgatgaagcgcttttcctgatccttcggcagctgatacgagttgctccagacccggccatgggcagccgcctcatgaccgcgacgcacgatctcccgggcgatctcgggcgaggtctcgactgccttgccgatcatgaaggacgacagcttgatgccgtgcttgtccatcagatcgagcaggcgcgggatgccctcatagtggccgtaggcgaagaacgcgttggttggcagatcgggaacgcctttctcgattggatcgggaatgacgccgcctgcgcccgagatcggctgaccgcccccctcgaacatcagcgacaggctcaccgcaaggcgcgcgccgttgggccagaaaccgcctgtgttggacgaggtctcggtatcggaggcggcgttggcgcgctggcttgtggcaccgagccccgcggccgcgagggctccggctgcggtgacggcctggagggtctcgcggcggctcagatgggtggaggaagcgtgggtcatggctgatctccttgttgatggaaatcctactagcctctttccgatttgagtattatcctgctgatattggagatattatctacttattggaaacaatcggtgctggacgacattaccgagctccgaaccttcgccaagatcgttgccgccggcagcctgtccgccgccgggcgcgagatgggcatctcgctcagcgttgtcagcaaacggctcgcgacgctggaaaggcgtaccgacaccagcctgatcgtccgcagcacgcgtcacctcgcgctgaccgaggagggacaaaggctgttcgaccgggcacagcgcatcctcgccgaggtcgatgaagcggaggcctcgctgacgcatggccgcgtcgagccgcagggcgtgctacgggtcagcgcaacggtcgcgctcggccgcgctcatgtcagcccggtctgccgcgatctcgcgctggcccatccgaagatgtcggtcgagctcatgctcaccgaccgcctcgtcgagctgatcgacgagcgcatcgacgtcttgatccgcatcggcatgccccgtgactcagacttgatcatgcgcaagctgatcgacaatcaccgcatcatcgcggcttcaccggcgtatgtcatgcgccacggcacgccagcctcgcccgaggatctcacgcagcatgattgcctgctctacaacagaggtgcgcaggcgcgttggcgactggtgcacagcgacggccgcgccgccgaaatcgaggtgtcgtcgcgactgcgctgcgacaacggcgaggtcgcgcatgactgggcggtcgatggcgccggcctgatcatgaagagctgggtcgacgttgcgcccgatctcgcgtctggccgcctggtgcaggtactgccggaatggcgcagcgatcccgcgccagtctgtgcattgttcgcgcagggacgccagatgccgacacgggttaggctgttccttgacgccatctcgaagcggatggcggcgtttcaggtggccggcggcgcgtagcgcgcagccatcacggcgtcgaacgcatttgccatgacgtccgtcgaaggcatcatgctcgtgaacaattcgaatgcgtccgccgcggcgtagatcgcgagatcgcgcccggtcaggactttggcacgcttggccttggccgccaacaatagcggtgtccagagcggcgtgtagacggcgtcggcaacccacatcgacggatgcagtagcgcgtccggtaccggcgtgtcgcggctcggcagcatgccgaccggcgtagcattgacgacgccagtcgcgccatcgagcgctgcctcgacgctggcgacgccacgagccgcatgacggccggccaactggccggccagtcgcgcgaccttggccccatcactgtcgaagatgcgcagttcgccgacgccgaggatggccagcgcaaaggcgatggccttgccgacgccgccggcaccgatcagcgcgatcgggccgcgcggtacggtggtaagcagcggtgcaatcgcgcgcacgaaacctgatgcatcagtgttgtacccgaccagacgtgcgccatcggcgacgatggcgttgaccgcgccgatcgcgcgcgcatccggcgcgaggtcatcgagcaggtcgatcaccgcttccttgtagggaaaagtgacattgacgccggcaaagccgagccgcttgatgccgtcgagcatcgcgcgcagatcgtcatgcccggcgcccttcacttcgatgagctgatagtggcaacggacgccgagcgcggcggcggcctgctcgtgcatcgcaggcgccgccgaatgcgcgatcgggtacccgatcagaccggtcaggaaacgatcgcgcattgtccctcacgtcggcagtgctcagctcatgcggtcgagccgagcatagctgtcttccatgccgtgctccatgccggtcgcgagcatcgccgcgcgtgtctcggcatccggcagcgtcatccgcatggtcatcacggtgccctcaccgtcgggcgcaaaccgtgtctcgacatgattgtcgggtgtcggatccggcaggtgcatgcgctcgacatgcacgatgcggctgaacggctcgagttcgagatattcgccggtgagatggaatccgccgcccttgccgtcggtccactcgtagcggatcttgccgccgggcctgagctcgctgacgcagaccggcatggtccagccttccggaccgagcagccacttctgcaacagctccggctcggtatgcgcgcgatacaccgcctcgggcggcgcgacgaagcgccgggtcacgacgatatggcggtcgccttcggtcttcagcgtcaacttgctcatagggcacctttcacgtctcgggcttcatggcggccagcactccgtccagccggtcgtaattggtttccagcgcgcggcgcagcatgccgagccattgatcgatctcggcaaccgctgatggcgccagccggcacggccgcttggtgccttcggcccgccgcacgatcaggccggcgccctcgagcaccttgaggtggcgggagatcgcgggctgggtcagctcgaacggctcgaccagttccatgacggtcgcttcgcccaaagcgagacgcgccagaatcgcccggcgggtcgggtcggcgagcgcggagaaggcggcatcgaggttggccatgatcgatctcagattagttatataacttacttgttatataaatgatcacgcatagtcaagcgaaatccgccgcggcggaggcgcgcggcggatttcggtcgtcatttcaatgctggatttacgcggcggctaaacgtcgaagaacaccgtctcgttgtcgccctggagatggacgtcgaacgtatagacgttgccgcccgtcttcttcgcgatcagggtggcgcggcgatcggccggcaccaacgccagcacggaatcgctagcgttggccgcctcgccgtcgaaatagatccgcgtgtagagatgcagcagcatgccgcgcgcgaataccgcgagcacgatgtgcggcgcctgcggcttgccgtcggcatccggcaccacgcccggcttgatggtgtcgaaggcaaagccgccgcccttgtcggtgccgacgcggccgaagcccttgaacgaggaattcggcagcgcgcgcgtgtcctgcggatcggagaagcggccttggctatcggcctgccagatctccaacatgcaatcggggatcacggcgccgtcgccgtcatagaccttgccctcgacacggatgcgctcgccggatgtatcaggcgtcagcagattgttgctgaaggcgtcgttccactcgtattccccgttcggcgtcaggccgtatttgaaataggggccgacggtctgcgagggcgtgattccatcaggacgctggttcgacacttacttggtctccatcggcgtggcgttgcgcccgcgcagcacgatatcgaagcgatagcacagcgcccattccggcttggtgttgtcgagatcgaacgacgagatcatccgcgcccgcgccttctcatcggtcaccgagttgaagatcgggtcgaacggaaacaagggatcgccggggaaatacatctgcgtcaccagacgcgagatgaaggaatgtccgaacaccgagaagtggatatgcgccggccgccacgcattgtggtggttgccccacggataggcgcccggcttgatggtaatgaacttgtagtagcccttgtcgtcgctctgcgtccggcccgcgccggtgaagttcgggtcgagcggcgccggatgctggtcgacgacatggatgtagcggccgcaggcattggcctgccacagctcgaccagcgtgttcggcacgccgcggccgtcctcgtcgagcacgtggccgtgcacgatgatgcgctcgccgagcggctcgcccttggcctggatagtgagatcattgtcgttcgcgcgcaccgtctcatgaccgtagaccggcccggtcaattccgagagcgtatgccgcatcgggatcagcggcttctgcggcgagcgcttgacagtggagcgataggccggcgacagccgcgccggatgagccgcaagcgattgcagcggatacaacagggtcatggcgaattcctccgcggcccacgcgcccggcgggctcacttcagatcattataatgcataaccaaattgtggaagggctgttttcagcctttccaagccattggatcaattcagcttttcgatcgcgaccgcgacgccctggccgaccccgacgcacatagttgccaaggcaagcttcccgccccgcttctccatgccgtgcacggcggtcaacaccagccgcgcgccgctcatgccgagcggatggccgagcgcgatcgcgccgccatgcggattgacgaaatcagcgtcttccttgacgccgagctggcgcaggcaggcgatgccctgcgaggcgaaggcctcgttgagctcgatcaggtcgaagtccgacaccttgatgccgagccgctcgaccagcttcctggtcgccggcaccgggccgatgcccatgatgcgcggcggcaccgcggccgacgcaaggccgaggattttcgcacgcggggtgaggccgtgccgtttcacggcgacttcggacgcgaggatcatcgcggcggcgccgtcgttgacgcccgatgcgttgcccgcggtcaccgtgcccggattgcgcacgatcggcttcagcttggcgagaccttcgagcgtggtctcggggcgcggatgctcgtccttgtcgacggtgatcggaccggccttgccgccgggcacctggaccgggatgatctcctcggcgaaatagcccgacgcgatcgccgcgccggcgcgctgctgcgagcggatcgccatcgcatcctgatcggcgcgcgagacctggaattcctcggcgacgttctcgccggtttccggcatcgcatcgacgccgtactgcgccttcatcaagggattgatgaagcgccagccgatcgtggtgtcgtagatctcggacgagcgcgagaacgcttccgaagccttgcccatcacgaacggtgcgcgcgtcatcgattcgacgccgcctgcgatcgcgaaatcgatctcgccggcgcggatggcgcggccagcggcgccgaccgcatcgaggccggaggcgcagagccggttcagggtctggccgggaaccgactccggcatgccggcaagcagaagcgccatgcgcgcgacgttgcggttgtcctcgccggcctggttggcgcagccgaaatagacctcgtcgacctcgttccagttgagcgtcgggtgcttggccatcagcgccttgatcggggccgcggcgagatcgtcggcgcgcaccttggcgagcgaaccgccgaaacggccgatcggagtccggacggcatcgcaaatgaacacatcacgcattgaatctctccctgaatgccgcgacttaggcgctgggtcggctggaacttgagatgggttttaggagcgcgcccgcggcaggtcaattgacgcggctgcgcgccccgcacgcattaccgtgagggccgtcataaaggcaccgtgaacagggtggaaaaccctcctctcgcggataggaccgcccggcgaaattttgtagtttccgccccctaatgaccattcagcagcctatccccgttccgcccgaagctactcccgccgaggcgccgtcgcgcgtcacgccgatgatggaacagtatctggagatcaaggccgcacatcccggcctgctgctgttctaccggatgggcgatttctacgagctgttcttcgaggacgccgagatcgcctcgaagacgctcggcatcgtgctgaccaagcgcggcaagcatcagggcatggacatcccgatgtgcggcgtgccggtcgagcgctctgaggactatctgcaccgcctgatcggcgccggacatcgtgtcgcggtctgcgagcagacggaaaatcccgcggaggcgaaagcccgcggcaacaagagcgtggtccgccgcggcgtggtgcggctggtgacgccgggcacgctgaccgaggacacgctgctcgacgcccgcaccaacaattacctgatcgcgatcgcacgcgcccgcggctcggccggcgccgaccggctcgggctcgcctggatcgatatctcaacctccgaattcatggtgacggagtgcgcgaccgcggagcttgccgcgaccttggcgcgcatcaatccgaacgaggcgatcgtcaccgacgcgctctatagcgaccacgagctggcgccgaccttgcgcgagctgccgtcggtgacgccgctgacccgcgacgtgttcgacagcgccaccgccgagcggcggctgtgcgactatttcgcggtcgcgaccatggatggcctgtcggcgatgtcgcggctggaggcgacggctgcggccgccgccgtcacctatatcgaccgcacgcaagtggggaagcgtccgccgctgtcgccgccggcgcgcgaggccgccggcaccacgatggcgatcgatccggcaacccgcgccaatctcgaactgacgcggacgctggccggcgagcgccgcggctcgctgctggatgcgatcgactgcacggtgaccgcggccggctcccgcctgttggcacagcgcctcgccgcgccgctcaccgatgttgccgtgatcgcgcgacggctcgacgcggtctcggctttcgtcgcggattcggccgcacgcgaggacgtcagaaccgtgctgcgcgcggcacccgacatgtcgcgcgctctggcgcggctctcggtcggccgcggcggcccgcgcgacctggcgagcctgcgcgacggcattctcgccgcggaccaggcgctggatctgttggcgcagctggccgatccgccggccgaagtttcgaccgtgatggcggccttgcagcgcccctcgcgtgacctggcgcaggaattctcccgcgcactgtcggagcaattgccgctgatcaagcgcgacggcggcttcgtccgcgagggctatgaggccgcgctcgacgaaagccgcagtttgcgcgacgcctcgcgcctcgtcgtcgccgcgatgcaggcgcgctatgccgaggacaccggcatcaagacgctgaagatccggcacaacaacgtgctcggctatttcgtcgaggtcaccgcacagcacggcgacaagctgttcgcgccgccgctgaatgcgaccttcatccatcgccagacgctggcgggacaagtccgcttcaccacatcagagctcggcgagaccgaggccaagatcgccaatgccggcgaacgcgcgctcaatctcgagctcgagatcttcgagcggctcagcgcgatggcgctcgccgccagcgacgatctgcgcgacgccgcgcatgctttcgcgatgctcgacgtcgcgacctcgctggcgaaactcgcgatcgacgacaattatgtgcggcccgacgtcgacggctcgctcggctttgcgatcgagggtggccggcatccggtcgtcgagcaggcgttgaagcgcgacggccagccgttcatcgccaatgcctgcgatctgtccccggcgcctacgcagaagtcgggccagctctggctgatcaccggtccgaacatggccggtaaatcgaccttcctgcgccagaacgcgctgatcgcgctgcttgctcagattggcagctatgtaccggcatcgcgcgcgcggctcggcatcgtcgaccggctgttctcgcgcgtcggcgccgccgacgacctggcgcggggccgctcgaccttcatggtcgagatggtcgagaccgcggtgatcctcaaccaggccggcgagcggtcgcttgtcatcctcgacgagatcggccgcggtaccgcgaccttcgacggcctgtcgatcgcctgggccgcgatcgagcatctgcatgagagcaaccgctgccgcacgctgtttgccacccactatcatgagctcaccgcgctctcggccaggctgccgcggatgttcaacgccacggtgcgcgtcaaggaatggcagggcgacgtcgtgttcctgcacgaggtgttgccgggctccgccgaccgctcctacggcatccaggtcgcgaaactcgccggtctgccgcccgccgtgatcacccgcgccaaatctgtgctggccaagctcgaggcccaggaccgcggccagaccgcacgtgcgctggccgacgacctgccgttgttcgccgtcccctcccgggccgccgccgaagacaagccgccgagtgatgccgatctgctggtggaagccgtgaaggcgctgcaccccgacgaaatgtcgccgcgcgaggcgctggatgcgctgtatgcgttgcgggcgaagctgccgaaggggtagccgcgtaggatgggtagagcgaagcgaaacccatcaactttcctacgcgcggaggcatgatgggtttcgcttcgctctaaccatcctacgccttctgcgcctgcttcctccgcccgatccgccacaacaccagattccacgcgatgcaggtggcaagcgcgcagcagaggcctacggccgagccgaattgcagcaccgcgacattcagcacggcgatgccgaggccgaagccgagcaggccccaggcgctgttggcgagcacggcggcggtggcgggaccgccgatccgcggatgcaggatcagcatcatcgaggagaacacgatcggaaacagcgcgatcacgccggtgacgcgcgggccgacccaggtcgacgcggtgaccacggtgccgaccaggctcgcgaccagcgcggcgcgcaagggaatgtcgtaccagcgccgcgcgatcagcggcatcctggcgacgtggcggtagggcctgagcagcggaatgcagatcgcaaacgcaatggcgttgaggatcaacccgccggccagcgtccaggcgaactggcggatgatggtgccgagcaccagccacaacgcgatcgcacttcccgcgctgatccacatgctgaagcgctgcgccagcacggcgtaagtgaggcccatgaagatcgtcgccgcattgaccggcaggctcgacagcgcgccctcggcgatgaaagcagcgtcatggtcgagcgcgaggaaggtgtaggacggcccggccgagatcggcaaagtggcgatcagcgcgccgatcaccggccccgaccgctccgtgatgatggatgcactgaccacgaacgcggccgcaaccgccatgcgcagaacgaggagcaggatgaagtggagttcgggggacatttttccgtcgtcccgggcaagcgaagcgcgacccgggacccataaccacgaccgctagcggggaacgaaagccgtcgagcagccgaatttcaacgatgggacacggcgtatgggtcccggctcccgtgcgcaattgcgcactaggccgggacgacatcggtgaaaggcggctacaccctcaccatcgacaccgacaccttcgggccgttcttgatggtctgatagaccacgcaatagcgctcggtgagtttcagcagcagatcgagcttgtcctgcggcgcgtcggtgccgacgtcgaagcggagacggatctcgcggaagccgaccggggcctccttgtcgacgccgagcgtgccgcggaaatcgagatcgccctcggcgaacacgttgccgaccctgagcggcacctcgaccgcggtcgcgaccgatttcagcgtgacgccggcgcaggcgaccagcgcttccagcagcatgtcgccggagcagagctcaagcccggagccgccggtcgcgggatgcaggccggcgaccgcaagcgcgcggccggtttcgaccttgcaggacaggctttcgctgtcgatcgtgcccttggccttcaacgtgatcacggcggcctgggggtcggtcttgtagcgctccttgatcggagcctgcattgcgcggagttcggcggagtccatgggtctgctcccggctattcttcttagccttcggatgtaaggccttatggcgccgatgtcaccaccacatcgcctcgccggcgctggatttgtccgtgacgtcacgcaccgaacggtctagcgagcggtcgagcgcggtcagcacgcggcgtttgaagctgtcgaacagttccgatttgcggtcgcgtggccgcgctagattgatggtgatctgctcgaacagccggcccggccgcggccgcatcaccagcacacggtcggccagcaccacagcctcgtcgacatcgtgggtgaccaggatcagggtcggccttgtgtcggcccagagatcgagcaggtggtcctgcagatcgcgccgggtgaaggcatcgagcgccgagaacggctcgtcgagcagcagcacttcgggctgcggcaccagcgcgcgggcgatcgccacccgctgcgcctgcccgccagagagctcgcgcggccaggccgacgccttatcggcgagaccgacgcgggccagcgcggatgcaacccgcgcgcgccttgcctccgccggcagatcggcgagaccgaagccgatattgtcggcgacgctgagccagggcagcagtcgcggctcctggaagatgatgccgatcttggcgtgcggcgacgtgatcaccgcattgtcgagtgtcacgctgccggtgctggcgcgatcgaggccggcgatggcgcgtagcaaggtcgacttaccgcaaccggaaccgccgataatggcgatgatctcgccgggcgcaatctccgccgagaagcgttccagcgcgtggacgccgttcggataggtcttgccgacgtccttgagtgcgagcatcactgccctccccgcgcgccgaacgcatcctgccagcgcagcagcggcgcggcggcgacctcgatcagccagtcggtgagcttgccgaggatcgcgaagatcacgatcgcagcgaggatctgcgccggcttgccgagctgctggccgtccagcaggagatagccgaggccctcggaggcgccgatcaattcggccgcgaccacgaacatccatcccaggccaagcccgacccgcagcgccaccacataggccggcagcaccgccggcaacaggatgcggcggatcatggccggcccggacagccggaacacgcggccgacctcgacgatcttgcgatcgaccgacaggatcgcgcccatcacgccgagatagatcggaaagaacaccccgaccgcgatcagtgcgaccttcgaggtctcgaagatgccgagccagagcacgaacagcggcacccaggcgagcgaagggatcgcacgcaaggcctgcacggtcggatcaagcagccgcttggcgaaatcccaatagccggagatcgcgcccatgatggtgccggcgacgacgccgagcgcaaagcccgcaccgacgcgccacaaggtcgcgaggatatgccgcgacagctcgccgctcctggcgagttcgacgatggtctggaacacctttgacggcggcggcaccaggcggccgttggaatagccgagataaaccaccagttcccagccgagcgcacacaccaccggcaccagaagcccgagcgccggccgcgcaaaacgcgaccagcgcgccggcgccgcacgcggcgcggccgtctgttccagcgcgggcaggtcaacgctcatggccatagcaagaactattcttcgcgagggattgcaaggtggggatcgaaacacaagtcgcggcgcccgcttcccttctccccttgtgggagaaggtggcgcaaacgaagtttgcgacggatgaggggttgtttcagcttgcgcgagcgtgccgtgtggtgagaacccctcaccccgcttcgctgcgcgaagcgacctctcccacaaggggagagggtgcagcggtcagttcgtcggcagcgggacttgatcgtcgatcaacgcgtccagcgccgccttcacgtcggtcttggcatcgatcacgcccgcctgctgcaaggcgaggccggcggccaaaatcgactcgcgctgcggcgcgcctatccggctgtgggtcagctcggtgcgctccttcagctgcttgtcgaccacggcgtccggcagtttcgttaccgcgatgaacgtcttcttcagctcgtcatagttcgccagcgaatatttccgcgcctcctcataggttgcgagcacgcgacggacgatgtccgggtgcgccttcaggaactcctcgcggacattgaggatgccccaggtgttggcgtcggccttgcggtagaacagcttggcaccctcctcgacctcggcctgcgccatcatcggatcgagcccggcccaggcgtcgacatcgccgcggatcagcgcggtcttgccgtcggcgtgctgcagcagcaccgtcgtgatgtccttttcggtcaggcctgcgccgagcagcgcgcgaaccaggaagatgtgcggatcggtgccgcgggtcaccgcgacgcgcttgcccttgagatcggcaaccgaggcgatcttggagtccttggtggtgaccagcgcggtccattcgggacgcgaatagacgtagaccgacttgatcgggttgccgttgatccgggcgaccaaagcggccgagcccgcggtcgagccgaaatcgatcgagccggcattgaggaattcgagcgccttgttggagccggccgactgcacccagacgatgccgatgccgtccttggcgaactccttctccagcaggcccttttgcttcaggaccatcgacaccggattgtaggtcgcccagtcgatccggatttccttcagcgcatcggcggcgagcgccgcgccgggcaaaagtgccgagaccgcgagcagcgccgcgaagccgcgccgggaaaatttgtgcattcgtcgatctcctcgatcagattaagaaacaatcttttaattcaatgagttagccttgcggtcaacgagaaaatctctaccctttacgagacgccgcgagaacgatcttgctcacggcgccgccaggaaagcatggagctgctgtcgtcatactttggtcagtgacagcaacagcttcgtccgatatcggatggacgtatggacagcatcgtagccgacggccgcgctgaagcggatgatcgtttcgagactgcgcggatcaccgcggcggtcaatgcgctggccgagcagcatgccggccgcgaggaccagttccgcgccgcgatggcgcaactcctcaaggccgagctgatcgcggcgcgcgccacggcgcaggcgctgctgctgaaggaccgtcacggccgccgttgcgccgaacggctgtgcttcgtgcaggacgagatcatccgcatcctctatgcggcggcgacccggcatctctatcactcgccgatcccctcgggcgccgaacgcatggccgtggtcgcgaccggtggctacggccgcgggctgatggcgccggaatccgacatcgatctgctgttcatcctgccctacaagcagaccgcctggggcgagcaggtcgccgaagcgattctctattgcctctgggacatggggctgaaggtcggccacgccacccgctcggtcgatgaatcgatccgccaggcgcgcggcgacatgacgatccgcaccgcgatcctggaaacccggttcctgaccggcgaccagccgctgtatgacgagctggtcgagcgcttcgacaaggaagtggtgcagggcaccgccgcagaattcgtcaccgccaagctcgccgagcgcgaagagcggcatcgccgcgccggccagtcgcgctatctggtcgagcccaacgtcaaggacggcaagggcgggctgcgcgacctgcatacgctgttctggatcgccaagtacgtctaccgcgtgcgcgagaccgacgagctcttggaacgcggcgtgttcgacgcgcaggagtaccgcaccttccgccgctgcgccgacttcctgtggtcggtgcgctgcaacctgcacttcttcgccgggcgcgccgaggagcggctgtcgttcgacatgcagcgcgagatcgcggtccggctcggctacacctcgcatcccggcatgcaggatgtcgagcgcttcatgaaacactacttcctgatcgcaaaggacgtcggcgacctcaccgcgatcctgtgtgccaggctcgaggaagagcacaacaagccggcgccggtgctgagccggatggtcgcgcggctgcggcccggcaccaagcggcggcgggtcaacggcagcgacgacttcatcgtcgacaacaaccgcatcaacctcgccgcgcccgacgtgttcaagcacgatccggtcaatctgatccggatcttccgcctcgcgcaacagaacaacctcgccttccatcccgacgcgatgcgcacggtgacgcgctcgctgaagctgatcaacacccagctgcgcgagaacgacgaggccaatcgcctgttcatggagatcctgacctccgacaatgcggaagtcgtgctgcggcggatgaacgagaccggcgtgctcggccacttcatccgcgccttcgggaagatcgtgtcgatgatgcagttcaacatgtaccaccactatacggtggacgagcacctgctccgctgcatcggcttcctgcaggacatcgagcgcggcggcaacgaggagttcacggtcgccagcgacctgttccgcaagatccgccccgagcatcgcccggtgatctatatcgcgacgctgttgcacgacatcgccaagggccgccccgaggatcactcgatcgccggcgccaaggtggcgcggcggctgtgcccgcggctcggcttctccgccgccgacaccgagctggtggcgtggctgatcgaggaacatctgacgatgtcgacggtggcgcagtcgcgcgatctgtcggaccgcaagaccatcgagaacttcgccgccgtggtgcagtcggtcgagcagatgaagctgctgacgatcctgaccaccgccgatatccgcggcgtcggccccggcgtgtggaacggctggaaggcgcagctcttgcgcacgctgtactacgagaccgagccggtcctgaccggcggcttctcggaagtgaatcgcgcccagcgcatcgcggtggcgcaggccgaattccgccgcgccttcaccgaatggccggaggtcgagctcaacgcctatatcggccggcattacccggcctactggctcaaggtcgagctgccgcgcaagatccgccaggcgcgcttcatccgcgccagcgagcaggccggccacaagctggcgatcaatgtcggcttcgacgagatccgcgccgtcaccgagctcacgatcctggcgaccgaccatccctggctgctgtcgatcatcgcgggcgcctgcgcctcggccggcgccaacatcgtcgacgcccagatctacaccacgaccgacggccgcgcgctcgacaccgtctcgatctcgcgcgaatacgaccgcgacgatgacgagggccgccgtgcgacccggatcggcgagatgatcgagcaggtgctggaaggcaagctcaggctgcccgaggcggtggccaagcgcgcggtgcgcagcaaggcgcggccgttcatcgtcgagcccgaggtgaccatcaataaccagtggtccgaccgctacactgtgatcgaggtctccggcctcgaccggcccggccttctctaccagctcacgacagcgatctcgaagctcaacctcaacatcgcctccgcccacgtcgcgaccttcggcgaacgcgcccgcgacgtgttctacgtcaccgatttgctcggcgcccagatcacggcgccgacccgccaatcggcgatcaagagctcgctgctgcatctgttgtcgagcgaggagcaggccgcgaagccggcggcttgattatccgtcattccggggcagcccgcagggctgagcccggaatccatcgggccgcacgtcatgccgtggaatggattccgggctctcgcttcgcgagccccggaatgacagctgagtttgctcagcgaaccgccaccccctcatgccttagcaaccagcgcttcctctccagcccgccgccgtatttgaccagcgagccgttggcgccgatcagacggtggcagggcacgacgacgctgatcgggttggagccgttggcgtggccgaccgcccgcatcgcgttcggcattttcagcctcacagccagcgcgccgtaactcatggtggtgcccggcgggatcttcggcagcgcgtgccagaccttctgctggaacggcgtgccggcgacgcgccattcgacatccgcgagccgaccgagatcgccattgaaataatcgccgagcgccttgcgcatcgccgccggcgcacggccgtcccgcaaggtcaccacgccataatgcagccgcagcagatcgagcatccgcccctcgtagtcgtcccagtcgagcgcgcgcagcacgccgtcatcatcggtcaccagcagcgcagtgccgatcggggtcttgaggcggtcgaggttgaaggtctgcgcggtcttgcggtcggccattgtaacgtccagggacgaacggatcggtcgggatacaattcactgcccgcgtggtagcgtccacccgaattccggtgggagcgttttcgagcgaagtggacgccggttcgcgtgaagaaaacgcctcaaacaagatctctggggggggccgaatatgcttgtgcttgccaattttctgatcgcggtggtggccgcgctgcacctctatttcctcgtgctcgagatgttcctgtggaccaggccgctcggcctgaagacctttcgcaactcgctcgagaaggcaaccgactcggccgtgctcgccgccaatcaggggctctataacggcttcctcgccgccgggctgatctggggcctggtgcacggcaatcccgccttcgcattccagatcaagacattcttcctgctctgcgtgatcgtcgccggcgcctatggcgccgccaccgtgagccggcgcatcctctatgtgcaggcggcgcccgcggcgctggcgctgatcctgctgtggctggtctgacgcgacactgcgcgccagggcatcgtcttgcaatggccatagcgttcctccatcatccccgacaacggtgacatccgccggcttgagtctcgcggacaagatcaccggcaacatgggaggtcacggacatgaggagcgtgcaattgctcgctgcgacagcgcttgccatcgcgttgtcggttacatcggccgccgcacagaagaaatacgacatcggcgccaccgacaccgagatcaagatcggccagaccgtgccgttctcgggccccgcatccgcctatgccggcatcggcaagacccaggcggcctatatgaagatgatcaacgatcagggcggcatcaacggccgcaagctgaacctgatccagtatgacgacgcctattcgccgccgaaggcggtggagcaggtgcgcaagctcgtcgagggcgacgaggtgctgttcaccttccagatcatcggcacgccgtcgaacgccgccgtgcagaaatatctcaatgccaggaaggtgccgcaactgctcgcctcgaccggggcgtcgcgcttctccgatccgcagaacgcgccgtggacgatcgcgttcaacccgaactaccagtccgaagggcgcatctacgccaaatacatcctggccaaccaccccaacgccaagatcggcatcttctaccagaacgacgatctcggccgcgactacatcgccggcctgaagagcgggctcggcgacaaggccgccagcatgatcgttgccgaagtctcctatgagctgaccgatccgacggtggattcccagatcgtcaagctgaaggccgccagcgtcgacctgctctacgacgcatcgacgccgaaattcgccgcgcaggcgatccgcaaggtcgcggacctcgactggcacccggtgcacatcctcgacatcaatgcgagcccggtgtcggcgacgttgaagccggccggactcgacatctccaagggcatcatctcgaccaattacggcaaggaccccgccgacccgcagtggaaggacgatcccggcgtgaaggcctatttcgccttcatggacaaatattacccggagggcgacaagctcaacaccgtcaacacctacggctactcgaccgccgagctcctgatccaggtgctcaagcagtgcggcgacgacctcacccgcgagaacctgatgaagcaggtgaccagcctgaagaagttcgtaccttctctggcgctgccgggcatgtcgatcacgaccggaccgaacgactatcgcatcaacaagcagatgcagatgatgaagttcaacggcgagcgctgggagctgttcggcccgatcatcgaggacaccggaccggcgggctaggcaaaacggcgcaaacatccttccggttcaaccagtcaaacaccttgtccggtgtcattacccgcgcacgtgtcgtcccggcgaaagccgggacccatactccgcggcggtgttgcgaacgggactcgtcgttcagcatccctcaacaatgaccattcgtggttctgggtcccggccttcgccgggacgacactgagtgtgctggcacagctgcggcggcccattttcgcaccgccccctactttcgttgactgaaatcgctcgccttttcggcattgctcgtcttgcgtcgcagcaagcgttccgccagtatccggcgcaagcgatggcgaccgcgggaccttgaacccgcgggaaagatcatcggccaaaccatcagtcacgtgagggaaacagcattatgaggaacgggattttccacctggtcacgggaacggcgctcgcgatcgcgctgtctgcaacgtcggccttcgcgcagaagaaatacgatcccggcgcgaccgataccgaaatcaagatcggccagaccgtccccttctccggaccggcctccgcctatgcctcgatcggcaagacccaggcggcctatttcaagatgatcaacgaccagggcggcatcaacggccgcaaggtcaatctgatccagtatgacgacgcctattcgccgcccaaggccgtcgagcaggtgcgcaagctggtcgagagcgacgaggtgctgctgaccttccagatcgtcggcacgccgtcgaacgccgcggtgcagaaatatctcaacgccaagaaggtgccgcagctgttcgccgccaccggcgcctcgaagttcaccgacccgaagaacttcccctggacgatgggcttcaatccgaactacttcgtcgaaggccgcatctacggccagtacatcctcaaggagtatccgaacgccaaggtcggcgtgctctatcagaacgacgacctcggcaaggattacctgaacggcctcaaggccgggctcggcgacaaggccgcgaccatggtggtttcggaggcgtcctacgaggtgtccgatccgaccatcgattcgcaggtcctcaagatcaaggattccggcgcggacctgttcttctcggcgacgacgccgaagcaggcggcccaggcgatcaagaagatctacgagatgggctggaagccggtccagatcgtcgacatcaacgccacctcggtcggcgcggtcatgaagccggcgggtctcgacgccgccaagggcgtgatcagcgtcaactacggcaaggacccgctcgatccgacctggaaggacgatgccggcctgaagcgctatttcgacttcatggccaaatactatcccgacggcgataaggattcgaacttcaacacctatggctacgccaccgcgcagatgctcgtcaccgtgctgaaggcatgtggcgacgacctgacccgcgagaacgtgatgaagcaggcggcatcgatgaagggtgtgacgaccgacatcgcgttgccgggcatcaaggccaacacctcggcgaccgactaccgcgtcaacaagcagctgcagatgatgaagttcaacggcgaacgctgggagctattcggcccgatcctcgaggacgctggcccgaccggctaaagcgcgatgagattgattcgaatcgtcatcgcgctttagctctttgtttgagcatgatcttttcggaaaaccgcttcgcacttttccggatcatgctctagcggttagcgttcgatgtctgaagaacaatcggcggcctccgggccgccgatttttgtttgcggccgtaccttttcaccgtcaccttgaggaggccgcgcagcggccgtctcgaagggtcgacggcccgaccgcggccgtgcatgcttcgaggctggctccgctcgcacctcagcatgacggggatggagatcgttgcgctcaatcgctgctgcgcgcctactgcggtatctccccaaagttcttgccgaccggcagcaccgcatgccggatcagccgggaatcctcgacgccagcctggcggtgcttcaccgcctcgcgatagacgggatcgcggatcatctcgacgaaggcggcgacgctcggatattcggcgatgaagcagtgatcccagcgctcctcttgcgggccgatcagcatcagctcgaagcggccctgccagacgatgcggccgccgagccgctcgaacaccgggccgctctcgcggccatacgccgcataggcttccgcgccggtggccttgcggccgtcgggataggcagcccattcgcgcaaccgcaccagattgagcatgtggatcgggcccggccggttgttgtcccggaattgcgcgaacacgtctttggtcggatcgatatggcccatgcggtgctcctttgttttttggttccccagagcgcgatcgctcgatcgcgctctaccatcctcgtttgagcatgatcttttcggaaaaccggtgcccacttttccggatcatgctccctatttagcaacgcgccgccccacctcctaatcccgcgttaagctttgcgtaaccgccccttaaaccgggaacgttagcgtgcggccctgtaagggtgagcgttgcggatggcgtggggacgtaaaaaaggcggtggacgcaaggagccgctgttcgggcttccggccgcgcttgccgacctcaggttgtcgccgtccgatcgcgttcccggcggcggcgacgacgacaagcccgccagatcgaagcccaagaacagcgaaaagaaccccgataagggcagcgattccggcagcgagagaccgcgcccgtcgcgcagtggcagcaagcggcgcggcaagtcgcgcggcttcggcatcggccggctgttctactggaccgcggtgctctgcctgtgggccggcattgcggtgatcggtgtcgtggtgtgggtcggcgcgcatctgccaccgatccaatcgctggaaattcccaagcgcccgccgaccatccagatcgtcggcatcgacggcagcgtgctggcacagcgcggcgaaatggccggcgccaacatcgcgctgaaggatctgccgccttatctgccgaaggccttcatcgcgatcgaggaccgccgcttctattcgcatttcggcgtcgacccggtcggcattttacgagcagccgtcaccaacgtcctgcatcgaggtgtctcgcagggcggctcgaccttgacgcagcagctcgccaagaacctgttcctgacccaggaacgcaccatgcagcgcaagctgcaggaggccgagctcgcgctgtggctggagcgcaagcattccaagagcgagatcctcgagctctacctcaaccgggtctatttcggctccggcgcctacggcgtcgaagcggcagcgcagcgttatttcggcaagtcggcgaagaacgtcacgctgccggaggccgcgatgctggccggtctcgtcaagtcgccatcgcggctggcgccgaaccgcaaccccgaaggcgccgagcagcgcgcgcaggtcgtgctcgcggcgatggccgacgccaagttcatcaccgacgcgcaggcaaaagcatcgatcggccagccctcgatcgcagtgaagccggccggcgccggcaccgtcaactatgtcgccgactggatcggtgaagtgcttgacgatctggtcggccagatcgaccaggacatcgtggtgcagaccacgatcgatccgaagctgcaagccgtcgcggaagccgccgtgatcgacgagctcgccgccaagagcgtgaagttcaacgtcagccagggcgcgctggtcgcaatgacgccggacggcgcggtgcgcgccatggtcggcggccggaactattccgagagccagtacaaccgcgcggtcaccgcgaagcggcaaccgggctcgtcgttcaagccgttcgtctatctcaccgcagtcgaagccgggttgacgccggacacgatccgcaccgacgcgccgctcgacatcaagggctggaagccggagaactacacccacgaatatttcggctcggtgacgctgacccaggcgctggcgatgtcgctcaacacggttgcggtgcggctcggcgtcgaggtcggcgccaagaacgtggtgcgcaccgcgcaccggctcggcatctcatccaagctcgagcccaacgtctcgatcgcgctcggcacctcggaagtgtccgtgctcgaattggtcggcgcctatgcgccgttcgccaatggcggctacgccgtatcgccgcatgtggtgaccaggatcaagaccagctcgggcaagctgctctacgaccgccccaccgatccgcccaaccaggtgatcgagccgcgctatgacgcgatgatgaacagcatgatgcgcgagacgctgatctcgggcaccgcgcgcaaggccgagatccccggctggaccgccgccggcaagaccggcaccagccaggattatcgcgatgcctggttcatcggctacaccgccaagctcgtcaccggcgtctggctcggaaatgacgacaattcgccgaccaagaaggcgaccggcggcggcctgccggtcgaagtgtggagccgcttcatgaaggcggcgcatcagggcgtgccggtcgcggcgatcccgaactcgcaaggaagctgggcgccggcgaacctgatgcagatctcgtcgcagatcacggcgccttcaggaccggcggcgccgatgcagatccagccgccgatacaggcgccgcaaccggcgccggtcccatccggcggctattatcgccagccaccgccgacaccggcccgcgcatcaccgccacccaacccgaacgcgcggccggaagcggcggcggggctggatggctggctggctgatcggttgtttcggtagggcgttagacgcacggtctcaccacaacgccactgtcatcccccgcgaaagcgggggatccagtacgccgcggcctctcgattgaaaactggcgcctctggaatactggatcgcccgctttcgcgggcgatgacagcagaggtgacggggatagtgtgggacgggtagagcgacgcgagcgccgcctattcctggatcccgtagcggtgcaggtcgttgccgtgggtgtcgagccagttcttggcgcgcgtgaccgacgcgcagaccttgtcgaccacccgccagaaccgcgccgaatggttcatctcgacgagatgcgcgacctcgtgtgctgcgaggtaatcgagcacgaagggcggcgccaggatcagccgccacgagaacgacagcgaaccggccgaggtgcaggagccccaacggctcgactggtcgcggatcgagatccgccgcacccgcacgccgagttccgcggcgtgcagggccgccgccttctgcagatccttgcgcgcctcgcgcttgaggaaatcatgcacccggcgatccatgtgctcgacgccgccggcgacgcaaaggatcttctcgccgctgtcgcgggtctcggtccacaccgtgccgcgctcacccgagcgatgcaccagccgatgcggcacgccgcgcaacggcaccacggtgccgggctggaacggtgcggccttcggcaaacggccaagacgcgcggcgatccagccgccatggatattggcgaactccttcgcctcgacgatggtcccgcgcggcggcatggtcaggatcgcttcgcggtcggtcggatgtatcctgagcgtatagcgccgcgcgcgccggtgccggcgcaacctgacggtgaagaactgggagccgtgtctgaccagtacggtcgcgggttcggcaggccgccgatagaggagcgcgcgagtagccatgtctgaaagtccggggagcaggagttcgcccgaactttgccatatccgccgccagggaaagcgctcggcgcaaaaacaaatcatttgcccaatatacaggggtcagccgtttattgacctctaccggcaggggtcggaaccgggattttttcgatgaatcggagtcgcgaaaaaggcccaagagatgaaattaaattcattacttgagcctcgactgatttgagattcttttatttaaatcagtgacttacccggacgcgataatcgcggccggggtgatacctattcggccgcggcgaccagggaaagtcgcgtattggccgccgaaaccatgaaatcggagatccgcggcacgatttcggagcggaaacgcgagccgttgaacacgccatagtgcccgacgcccttctgcacgtagtgcacgcgacgatggttcggaatggcagtgcagagcgcgtgcgtcgcctcggtctgaccgagaccggagatgtcgtccttctcgccctcgaccgtcatcagcgcgacgcggcgaatcttcgacggatcgaccggcttgccgcgatgggtcatctcgcccttcggcagcgcgtgcttgacgaacacgaggtcgacggtctgcaggtaatactcggcggtgaggtccatcaccgcgagatattcgtcatagaattcgcggtgcttgtcgaccagatcgccgtcgcctttgaccagattggcgaacagcgccttgtgcgcgtccatgtgccgatccagattcatgctgatgaagccgttgagctgcaggaagcccggatagacgtcgcgcatcacgcccggatgcgggaacggcaccttggtgatgacattgttgcggaaccaatcgatgccgcgctccgccgccagatcattgacagcggtcggattgcgccttgtatcgatcgggccgcccatcagcgtcatcgacagcggcacgaacgggtcgttgttggcttccatcacggaaacggctgccacaacaggcaccgaaggctggcacaccgcgatgatgtgcatgttgccgccgagcgcgtgcagcatctcgatcacgtagtcgacgtaatcgtcgagatcgaaccgcccttcggcgagcggcaccatgcgcgcatcggtccagtcggtgatgtagacctcatgggtcggcaggaacgcctcgaccgtgccgcgcagcagcgtcgcatagtggccggacatcggcgccacgatcagcacacgcgggtgcggcgagcgcagcgggcgcgtcagcttgcggtcgaaatgcagcaggcggcagaacggcttttcccagaccgtgcgaacctcgaccgccgtgcggatgccgttgacctcggtcgtcggcaggttccaatccggcttgccgtagcggcgcgtggtgcgctcgaacagttcgcagccggcggcgatcgatttgccgagttcggtgtgggtccacggattgagcgggttctgaaacaggatcttggtggcgtcggttaccgcgcgcaccggattgagcgacgcatgcgccatctcgtacatccagtacagcggcgtcgtgagtgccggactgccttccgccgccagtggcggtgcaccaaattcaccgatgggcatagtattctcagacccctgtttgcgccgcagcatactgaccaatgcgtaacattgcgtcaatgcgccgcaaaccgaatctggggtcgatgtcgggctaaaacaccgggaatccacgtgaaagtgacatttattcaccacccgcgagcagcgacccgttgcgcttggcgctctgtaaaagggcaaggaagatcgcaaaagaggcagcgaacaggatggcgttgatgaccagcgcccacgccatcaggtcggcacggaagacgtgatcgatcaggagcgaccgcatgccttcgaacacgtaagtcggcggcagcgtccaggcgaccacttgcagccaggccggcagcacctcgaccggatagtagatgcaggccagcggcatcaccgcgaacatcagcgtccagacgatgctctcggcccctaacccgttgcgcagcacgagacccgaggcgaatacgccgaccgaccagctggtgaagatcaggttgcagaagaaggcgatcagcggcagcccgatggcgtagaaattgaagccgaagaagaacagcgccagcagcgtcatcgggatcacgccgatcgcgagccggatcaggctcatgatcatcagcgagagcaggaattcgatcggcttcagcgggctcatcatcaggttgccgagattgcgcgcccacatctcctccaggaacgagatcgagaagccgagctggccgcggaacaggatatcccacaggatcaccgcgccgatcagcgtgccgcccgctttggcgaagaagcccgaggtctgcgagatgtagttctgcaggaagccccaggtgatgatctgcaatgccggccagtagatcagctccaggagccgcggccatgacgacatcaggagataccaatagcgcagcaccatcgcattgatgcgctgcagtgaaatgccgtgccggcgataactgaggatttcgctcatggtgcatcctccggcgcgccctcccgcacccggccgcgcgcgacgtcgaggaacacctcttccagcgtgtcgcggttgtagcgcgccatgatccgctccggactgtcgtcgtcctggatcttgccgcgcttcatgatgatgacgcggtcacagagccgttcgacctccagcatgttgtgcgacgccagcaggatggttgcgttatgggtcttgcgataggtctcgagatgctgccgcacccaatcggcagtgtccgggtcgagcgaggcggtcggctcgtcgagcagcagcaggtcaggctcgttgatcaaggccttcgccagcgcgacgcgggtcttctgcccggccgagagcttgccgttggagcggtccaaaaattctttgagatcgagatcaacggcgagctggtcgatccgctcgcgcagctgctccacggcgtagaggcggccgaagatggtcaggttctgccgcaccgtgagccgcatcggcatgtcgacataggggctttcgaaattcatccggccgagcacgtcatagcgctgctcggggatcttggcgcccagcacgctgacgctgcccgaagtcggcagcacaaggcccatgatcatcgcgatcgtcgtggtcttgccggcgccgttgccgccgagcaggccggtgatgctgccgcgcgcgatgcggaaggagatatcgtcgaccgcgcgggtggtcttgtagaccttgaccagctgcgcaacgtcgatcgcggccgatccgtcccgaccggccagcggcggctgattgggcgcgtgtccctgacccgttccgctctgctgcatatggccgtcattgggccattgcgacaataagcgcaaggcttgcccgccatccttgcgctaagtcgcgaatttgtgcgccgcccacggcacagctaaagtcccgagatgatgaccgacgtcgcttccgatttccgccaaccccgccgctatgtccgcctcgatacgatcctgcggctgcgctggctcgccgcgctcggccagctcgtggcgatcttcatcgtggcgcagggactggaattcgacgttccgatcgtgccctgcgtcatcatcgtgacgttctcggcgctgctcaatctggcgctgcagatcgcattcaacccgatgcaacggctggagccggcctatgccgcggccctgctcgccttcaacatcgtcgaacttgggggcctgttgtacttcaccggcgggttgcagaacccgttctcgttcctgttcctggcgccggtgctgatctcggccacggtgctgccgatccgcctgacgatcgcgcttggctgccttgcggtcgcctgcgcctcggcgctgttcttctatcatctgccgttgccctgggacggcgacgatcccttggtgctgccgccgatctatctgatcggcgtctggctttcgatcctgctcgcgatcggtgtcaccagcctttacgcattccaggtgaccgaggaggcgcgccagctctccgatgcgctcgccgcgaccgagctggtgctgacgcgtgaacagcatctgacccagctcgacggccttgccgctgccgccgcgcacgaactcggcacgccgctgtcgacgatcttcctgatctcgcgcgagctcgagaagacggtgcacgacccggccatcgccggcgacctcaagaccgtgcgcgagcaggcgcagcgctgccgcgacatcctgggcaagattgcgcaattgtcatccagcggcgcgccgttcgacaacatgaagctgtcgaccctgatcgaggaggcagtggcgccgcatcgcgatttcggcatcaacatcaaggtgcggcttgctgtcgcagcaacgcgcgaaccggtcgccgcgcgcaatcccgcgatcctctacggcgtcggaaacattctcgaaaatgcggtcgatttcgcgcaccagaccgtcgaggtgaacgcgtggtggaacgccgaaaccatcgaaatcgtcgtctccgacgacggcccgggcatcgcgcccgacatgctgaagcggatcggcgagccgtatctgtcgcgccgccggggcgcggacgaggcccaaaatgcgcgcggcggcctgggcttgggggttttcatcgcaaggacgctgctggaacgcaccggggccaaggtgtcgtttaccaatcgcccgttccctgatcacggcgccgtggtgcagatcgtctggccgcgcgagcggttcgaggaagcggcgggagacacggagacgtcatcttaagaacggttctcaatctcgcctctggcataccggatgcattgctctttctagacttgcacgcgactttcggctgccttggcagcgccccagtgcaaccccatatttagcgggtctatcacagggaaaaatggatcgtgaacgcaatcgctgaactgaatgaccatgctgacaaatcgctcctcatcgtcgaggacgacaagccgttcctggaacgtttgtcgcgcgcgatggagacgcgaggcttctcagtgaagtcgtgcgatacagtgtccgacggcatcgccgagatcggccgcgccgcccccgctttcgcggtcgtcgacctccgcctcggcgacggcaacggcctcgacgtcgtctcggcgttgaagcgcaagcgccccgaggcgcgcgcgatcgtgctgaccggctacggcaacatcgcgaccgccgtcaccgcggtgaagatgggcgccgtcgactatctctcgaagcccgccgatgccgacgacgtcgttgccgcgctgctggcgaccggcaccgagaagtccgagctgccggccaatccgatgtcggcggaccgcgtgcgctgggaacacatccagcgcatctacgagatgtgcaaccgcaacgtctcggagaccgcgcgccgcctcaacatgcaccgccgcaccctgcagcgcatcctcgccaagcgcgcgccgcgctaagcgaagtgacagattgttttgcgatggccgggctcgtcccggccatttgcttttgtaggacgcttcgtagcgctgcgtgggatgggtggagcgaagcgatacccgtggctcaagcaccgtcaccctcagggagcgcgcccttgcgcgcgtctcgaagggtcgacggccaccggccgggccgttcatccttcgagacgccgcttcgcggctcctccagcgacaaaggcgaagcctttgcgcggggatgacggattactgagtctaaaactcatgcccctgtgggtcgaccagccggttgatccgctgtgccgcggccatcgcaaagcgcaccgtcattgccttgcgggttgccgccggcaggcgatgctccggcgcctcgcaatgcagatgtgcgccatacgcatcggcgatgatcaggccggtcccggccgggaaaatctcgcacggcagatcctgcgtgaaggcgaagaacagccggtcgcaatgcatccggtagtcctgccatttctggtcggcgcgcagatcctcgaccgatgacttgatctccacgatccagatctcgccgcgctcattcagcgcaaccagatcggcccttcggcccgacggcagcggtaattcgctgatgcaggaaaatcccagcgatcgcagaagtcgcgccgtgccgcgcgcgatcgcaagcgcggtctccgactggcggaggtcgggcgcgggcacgagcgcgatctggcgggcgggcgattccatccgcagagagtagccgattcctcgatcggcggcagcgccggaatcggccgcaaattcgcagcgaagccgccttggtttcggcctcaagctaccgcgaagccgatggaacctcggctccgagggacgaaaacactgaaggagagacccatgcggtcacgcatcacacttcgctcgttcgtcttcgctctcgtaacccttccgctgtcagctgggctgtcctcggccatcgccaagcccgtggtcgaggtcgccttcgtgctcgacaccacaggctcgatgggcgggttgatcgagggcgccaagcgcaagatctggtcgatcgcgaccgcgatcgtcgattccaaccccgacgccgacatcaggatgggcctggtcgcctatcgcgatatcggcgacgactatgtgacgaggaaggtcgagctgacccgcgacatccaggatctctacgccaacctgctggagttgaaggcgcgcggcggcggcgactggccggagagcgtcaacgaggcgctcgatgttgccgtcaacaagatgcagtggacgcaaggcgccgacggcacgcgcatcgtgttcctggtcggcgacgccccgccgcatatggactatgcccaggacaccaaatatccggtcacgctcgcggtcgccaagcagcgcggcatcatcgtcaacgccgtgctcgccggcaacgcacaggataccgagcgggtgtggcgcgatatcgcgcagaacggcaacggcgagttcatcccgatcccgcaggacggcggccagatcgtcaccatcgagacgccgttcgacgaggacatcatcatcctgcaacgcgagatcaacggcaccgtcatcccctacgggccgcgcgcgcagcagaagcgcacggaatccaagacgcagcagctcgcgagcgtcgccgcggcctctccggcgcgcgcctccgagatggcgagcttcatcaacaagcgcgccaaggtgacgtcggaggcggtcaccggcgacggcgacctcgtcgccgacgtcgctgccggccgcaacgacattgccaaggtcaaggacgaggatttacccgacaacctccgcgccatgaagcctgaggcgcgcaccgccgaaatcgacaagcagatcgcccagcgcaagacgctgaacgaaaagctcgctgcgctggtcgccaagcgcgacaaatacgtcgccgaacaccgcaagaatacgccgaaggcgtcgtcgttcgatcgcgtggtcgaggatacgctgaaggcgcagatcaagcgctagggaggactggccgcgctctatcgcttcccttccccgcaagcgggagagggagcccgggcgatgtgctcacatcactcggtcacgccatccaccggtggtcccaggatcacgccttcattggcccgcaggtcgagcacgccttcgaccttctcgccttgccggtccatgaaagtcgacagcagcacctcgttgctgaagccgatcgcgctggaggagaccgacgcgggggctgcgccgaagttcagcgcgatcacggcgacgccttcggcggcgcggcgccggaacagcaggacatcgccatgcgcggccaccggctcatagctgccatggacgagctgcggcagctttcgccgcaacgcgatcaacgccttgtagaggtcgaggatcgagccccgcgccgcctccaggcgcgcgacattgtcgcttgcataatcctgcgcgagcggcagccacggcgtcgcggtcgagaacccggcatggcgttcggcgctccattgcatcggcgtgcggcagccgtcgcgaccgacgccgagaccaggcacgttcttctcgaagggatcgcgcacctgatccggcgcgatcgcgacctgatgcatgccgatctcgtcgccataatagagcgtcggcgtgccgcgcagcgtcagcagcagcatcgccgccaccggcacctgcgccggccccacccggctcgccacccgcggccggtcgtgattgccgagcacccagttcggccatgccccgggcggcaacgccttttcgtaatcggcgacgatctgctcgaccgcgcgcgcgctccacaaggtcgacagcagcgcgaaattgaacggcatctgcgcgccgcgcagatcgttgccgtaataggcgaccagccggtgcagcggcaggtagatctcgccgatcagcacgcggttgtcgaactcctcggtgacgcggcgcatttcggtgatgacggcatggacttcgagctgatcggtcgagtattgcgtcagcaccttctcatgcggcggccggccctcgcggtaatgcgggttcggcgggttgtcgcggaattcggcatccttgatcaagtgccagatcacgtcgacacggaagccatcgacgcccttgcgcagccagaagcgcatcacgtcgtagattgcgtccctgacctcgcggttgcgccagttgagatcaggctgctgcgccaggaaggcgtgatagtaatactggcccgaggcctcgtcataggcccaggcgctgccgccgaattccgacagccagttgttgggtggaccgccatccggcgctccatcgcgccagatgtaccagtcgcgtttcgggttatcgcgcgagctcttcgcctcgatgaaccagggatgctggtcggaagtgtggttcggcaccagatcgaggatcagcttgaggccgctgtcgtgcgcggccgcgaccagcgcgtcgaaatcctccatcgagccgaacagcggatcgatgccggtgtaatcggagatgtcgtagccgaaatcggccatcggcgaggtaaagatcggcgacagccagaccgcgtcgacgccaagccgagtcagatgaggcaaccgcgcgatgatcccccggagatcaccgacgccatcgccattgctgtcctgaaacgagcgtggatagacctgatagaagatgccgcgccgccaccagtcgcgctcgtcctgatccatccgattccccctcgctcgtcgccccgtgtccccggggtcgtccgcgttcagggatgacgcacaattcgggacagaaagatggcgctggcgcgtcagtggcgggccatcgccagctgatagatggtaatcagcacctcgaacaggatcaggaagacgatgatcaactccagccgcagcgagcggctggtgtcgatgatatcggtcagcacctgcgcggtctcggccacgaccgcgagcttgcggttgagcgattccgcgcgctccttcaattcatactcgtcctcgagcctcgcatagagccgctcgagctgcggcttgtcccagaggatgtcgggcttctccgacacctcgaccggcccggccacgcgatgccgcaccgacagcgcgttgccgatgtgcttgaggatcgcaacacggccaccaagcacccggccgcccttggcgagctcgcgcgcgaacggttcggtggagtcgaagacggcccggacctcgcgttcatgccgcgccagcaccacgctcttggccagcgcctcgccgaccaggatcagccgttccggcgacaggctttgcagatagatcggaccgccgggcggaatctgatcttccttctcggcggcaacctcgataatcgcgatctcctcctcgcggcgcgtgaacaggccggtcatgcgcgactgcaggctgcgcaggaattcatcctcctccagcgcattgaggccgatcaggacgacgacgccgtagcggaacaggatcgccacaccattttcattgacgcgaaacgccagcggcgtcgtggccagcacgtcgccgcgctcgaggccggacgtgttgatgcggtccgcgacgaagaaggcgcgggcggtggtccggggtccgccgagcggtgagttgggagcctgggtcatgaaattccggactacgaggacttgacgcatgatcgagagcacccgccgaccggcctgctcacgaacttgttctgctgcgggcgaccttatcacggtccgttttgggatcacacgccatggcgggcgcatttggcgtgcgtgttgacgtcatttcccggaagcctatggtgccgccatgaccgagacaaccgacaccaaaccgaaggccggcgcgatcatcgtgccggtgacgctgttcgaacagaactgcaccatcatctggcacgagccgaccaagaaggccgtggtgatcgaccccggcggcgacgtgccgaagattcaggcggcgatcaagcagaccggcgtgacggtcgagaagatctggctgacccacggccatatcgaccatgtcggcggtgccgccgacctgcgcgatgcgctgcaggtcaagatcgagggcccgcatatcgcggacaaatatctgctcgacaacgtcgtctcgagcggcgagcgcttcggcatgaccggggtgcgcaatttcggccccgaccgctggctcgacgagggcgatcaggtctcgatcggcgacctcaccttcgacatcctgcactgtcccggccattcgccgggcagcgtggtgttcttcaacaaggagctgcgcttcgcccatgtcggcgacgtcttgttcgccggctcggtcgggcgtaccgacctgcccggcggcagtcacccgacgctgatccagtcgatcaagcagaagctgctgccgctcggcgacgatgtcggcttcatctgcggccacggcgcgggatcgagcatcggccaggaacggatgacgaatccgttcctgaccggcgagatgtaggcgcgcgcttagcttcctgtttgagcatgacctccgcgcaaacgcgtttcgcgtttgtcgcgagggaaaagccgcttcgcacttttccggatcatgctttgacctcagggctgcttcatcagccctgcggcggtcaacgcccgcgtgatgacgccgccgacatcgacacccttgcttcgcggcttgccctgctgcctggcttgcttctttcccggacggccgctgctgcggacggccacaggctcgggcttgcccgcaggcacggggatggtcatcgagatcgtgtcggcgttctcgcgcggcaccccggtcggcgcgatctgcggctgccggacctggtcggtcaggccgaagaagctcgcgatgtgataggacgaggagatcccggcttcgatcaggaacgcgccctcgacgccgtaacgctcgtcattgccggccagcccgagcggcgtgccgtgcgccatgtcggtgatcgagtaggattcgaccaacgtctcgccgtcggcattccaccacacctcgcgcggatggccgtcgacatcggctctcgacatcgccgcaagcggcaggccgtgcaggtcgagccactgccgaacgatcgcatcggcattgcccggatgcacggtgcggtcggcgctgccgtgccacaccgatatcctcggccaatcgcccttgtgcttggacgctgcgcgcacgcggtcgccgagctccggcgccgacaacgcgcttccctgcatcatgccgccgagcgcctcgcgcagattgccggcaacgccgaacggcagcccggcgatgacggcgccggccgcaaacacatccggataggtcgcgagcatgacggtcgtcatcgcgccaccggcggacaggcccgtcacgaagatccggcgcggatcgatcttgtgcgcaccggcgaggtgcccgaccatctccctgatcgatgcggcttcgccctggccgcgcgcgatgtcttccggatcgaaccagttgaagcaggtgttgccgttgttggcggactgctgctcgggcatcaacagtgcgaagccatagtgcctcgccaatgtcgaccagccggcgccgagatcgtatgacgcggcggtctggccgcagccatgcagcacgacgacgagcgcgggcgatcgcgccagctgctccggcacgtatgagaacatcttcagcgcaccgggattggcgccgaattcggtcgtctcgacgagcggcgtcggcacggccggcgcgagcgcgccgaggccattgaacgcgttcatcttgggcagatgacgcagaaattcgatgttgttgaccagcgacaacagcaactcctgaggtgatttattcttgtgtgtcacccgatcagataattgctgcactgcgaaataaaaagcccgtgtgctgtctttccccgcggaatagtgagattcggcgttaaagcgtgaccggaaccgggccgcgtgcggatcgctcgaaatagttgccgtagcaccttgttcgagcatgaacttttcggaaacagcgcaccatcgcctccggattcatgcgctggcccggcgcatccatgacagaaatgcggctgaaatggatatcgacagcacaaacaatgcgcatgccgcaaacaacgccagatgcgctgatgtcgcgccctcgatagcgaagaagaccgcgccgatcgcggcgacgccggccgcattgccgatctgcgtcgtggtgccgtacatgcccgagccggctccggcacttgccggcttcacgctcgacagcaccgcgctcgacagcggcgccattaccaggccctggccgtagccgaagatgacaagcaccagcgcgagcagcagcgccgatggcgctgcgatcgcctgaaccgtcgcgaccagcacgccgagaccgacgatctgcagcgcgcagccctcgatcagcaccagggtgccgcgatgcctggcgcgcatgccgctgtgccgcgaggcaatcacgaaggtcagcgccagcggcacgaataccagccctgcctgcaacggtggaatctgcaagcccttctgcatgaacatggtcatgaccagatagaaggacagattcgcgaagaagaagaagaacaccgcgaccatgccgcgcgtaaaagtgcggtccgacagcagcgaaagatcgatcagcggcatgccgccgcggcgcgcgacgctccgctcgatccgcacgaacgccgcgatcacggcaatacccgcggccatcaccagccagacccacgccgtccagccgagatcgtgaccgaacagcagcgggccgatcagacacaataggcccacgaacagcacgatcgcgccgggaatatccagccgcgtgccggcgcggcgcggcaccgtcggcatgatcttcagcgcggcggcgatgatgacgacgccaaacggcacgttgacgaagaacaccgcgcgccagccgaggccggcgagatcgagcgttaccagcgcgccgccgagcatgaagccggcggcgccggcaagccccagcacgatgccgtagattgcgaaggcccgcgcacgggcggcgtcggggaacaacaggtgcagcgtcgccagcacctgtggcaccatcagcgccgccgtagcaccctgagcgagccgcgcaacgatgagctcgggcccggattgcgccagcccgcaccatagggaagtcaccgagaagcccgcgacgccggcgacaaacacgttcctggtgccgtggatatcgccgagccggccgccggtgaccaccagcgtgccataggcgatcagatagatcgcgatcacagcctcgatctgcgccggcgttgcctgcagctccgttgcgatcgtcgggatcgcgacgttgacgatgaaggcatcgacgccgaacatgaactgcgccgacaccacgatcgccagcacccaccagcgccgggatgtctccgcgcgcgtcgcaacgatctggtgcatgctctgtcctgcccgaaatgacgtaacggccgacatcagcagattccagtcatctcttcgattacctcggacgtaagcgttggttcacgggcgtgtcatccatggccacccccacctgcccgtgctccgccgcgcaatttgcgttgacgcgctgggaaacattccggagcgcggcaatcgccgccgatttgcgcaacaaccatgcgggcgccgcagcctcggagcattgccttgccccgggccattccgtaggttggcggaaagccccgataacaataagttggagagaacgacctatggcgcgcctcaagttcggagccttcctcgccccgcatcacccgatcggcgagcatccgatgctgcaattccgccgcgacctcgatttcgtcgagcagctcgacgcgctcggttacgacgaattctggtgcggcgagcaccattcctcgggctgggagaccatcgcctcgccggaaatgtttttggccgccgccggcgagcgtaccaagcggatcaagctcggcaccggcgtgatctcgctgccttatcatcaccccttcaacgtcgcgcagcgcatggtgcaactcgaccacatgaccggcggccgcgccatcttcggctccggccccggtgcgctcgcctccgacgcgcatacgctcggcatcgacccgatgacccagcgcgaccgccaggacgaggcgatcgcggtgatccgccgcctgttcaacggcgagcgcgtcaccgccaagaccgactggttcgagatgcacgacgctgcactgcagatcctgccgctgcaggaggacatgccgttcgtggtggcctcgcagatctcgccgtcgggcatgacgctggccggcaaatacggcatcggcatcatttcgctgggctcgatgtcgacccagggcctgatggcgctgccgcagcaatggcagttcgccgaggatgccgccgcgaaggccggcaccacggtaagccgcgccaactggcgcgtgctgctgtcctggcacatcgccgagacccgcgagcaggcgcggcgcgaggccggcgccgggctgatgcgctggcacaacgaatataatgtcggcaccctgatgcggccgggcctcaccgcgttcgcctcgccggatgaagcggtcgacaagaccgcgttcatcgagggcgccgcgtccaccatcggcacgcccgatgacctgatcaagatgatcaagaatctggtcgacgtctccggcggcgttggttcgatcatcggcttcgcgcatgactgggccaatccggaaaacacccgccgcagctgggacatggtggcgcgctatgtcgtgcccgagatcaacggctatatcgacggcctgcgcaagtcgcgccagttcctgatcgacaaccgcgccgtgttcgagcgcgccggccaggccgtgatggccaagatcatgcagaacgacaaggccgccgcagcgctccagcacaccggcacaggccgcgtcgcgatcccggccgtgaatgcgcccgatctcgccaaggaagcggcgaagcagaaggcgtgatttgtgtcccggcgcgggacgagaatcgcaagatcgtgccacatccaccgctgtcgtcccggcgaaggccgggaccgatacgccgcggcgggtgttgtcagagggactcgtcattccggcgtcgttcaacaacgaccattggggttatgggtcccggccttcgccgggacgacgctgagtgtttggcgcggcttgtgaatcacatgcccgccttctcgtggcatgatttgcccgagccttgctcttcgtttcgccctctctcttaacagagagccactagcgaagcgctctcctcgaacatcatccgccctcgggcctcaaggcctgaaacttgatctcgtcaacacgcgaaagaacaaactccagcaacggcgaacggttaccttcattgtagcctagcaccagatcgaccagcggcggcgcaccctgaatcggacggcagacgatggttttcgggagcaagttctgcgcgtagagcggaagaaggcagatgcccccagtggaggcgatcagcgaaatagccatggctagattctcagcttggtgcgccacttccatcgccaacccatgtcgcgtgaaaaagtcattgatcgccgatcgcagcgttggggctctcgccgcagacacgccgatgtagctctgtcctgccaaatccttaggacggaccgcggagcgcgccgcaagcggatggtctcgtggcatcatggccaggatcggatcatggcggagcaatttgaactgaaggcccgccgcgctcttctccggacgcatgaacgcaagatcgatcttaccccgcgtcaatgccgcagcgaggtcgggcgagtcctcgctacggatcgtgatttccgtactgggcagcttgccgcgcaggatattcatgaccgccggaagccagtccatctcgtagccggtgagaaacccgatcgagaaggccgatttcgcgggctgggcggcgcgcctcgcggcttccgcggcggcctcgacctgcagcagggcgacccgcgcgtggtctagaaagacgcgccccgacggcgtcaattcgatgccgcgcggtccgcgcacgaacaactgcaccccaagctccagctcaagatcgtggatctgacggctcaatgatggctgcgcggtgtgcagacgcttttccgccgcaaccgagaagctgccctcttcggccacggcgacgaaataacgaaggtgccggagctccatagctatccctcaaaagtatagctcgaatcctacgaagtctttctcaaagaagccagccccaactaaatctccagtccatcgagccacaccgacgcaagagccttcagaccttcattgcggacgagttgagctaaccaggccgattaagcatatcggccataccatttggagagtgacatgaccaaacccgttgtcctgattacaggcgcccttaccggtatcggccgcgccgcggcgctcgccttcgcccgcgagggcgccagcctgattgtttcagggcgccacgacgatgcaggccgcgagttgaccgctgaactgcgttcgcacggcgtcgaagccgaattcgtccgcgccgacgtccggcgcgagagcgacgttgcggcattgctcgagcggacgatcaagcggttcggccggctcgacgtggcggtcaacaacgcaggtacggaaggcgcgccgggcccgctgactgagcagacgccggagagctacgcagcaacattcgacaccaacgtcctcggagttctgctgtcgatgaagcacgaactccgggtcatgcagccacaaggcttcggcagcatcgtgaacatctcatcgaccatgggcagccgcggcgcaccgaacgcttcgctctacgttgccagtaagcatgccgtcgaaggcttgacgaaatctgcggcgttggaagcggcggccttcggcgttcgcgtcaacgcgatcgcacctggtccgatcgagaccgccatgctcgaccggttcacaggctccgccgatcggaaggccggattgatcgcgggaattccgctgaagcgcgcggggcgccccgaggagcttgcggacgccatcctgttcgcggcctcgagcaaggcatcgttcatcaccggccagatcatcagcgtcaatggcggcaagacggccgcgtgaaatacccccgataacaatccaaacaggagaacaatcatgaccgacctcatcagccgaactgctctcgtcaccggtgcctcccggggtatcggccgcgccaccgcccgcgcactcgctctcgccggcgcccgcgtcatcgttcactacggcaattccgccgaggatgcgcattccttggtcgcggagattcgcgaagccggtgggcaggccgacgccgtcggcgccgatttgtcagcatccgatggcgcgcagaggctcgccgccgaggtccgcaagctcgtcggccaactcgacattctcgtcgccaacgccggaattgcggtgcccgccaccatcgaagcgcagaccatcgaggatttcgatcgcatgttcgcggtcaatgtccgcgcgccgttcttcctggtgcagcagttgctcccgatgctgggcgacggctccagcatcgtgatgacgtcgtcactggcggcgcgggccgccgtcgggcagttgtcggcgtattccgccaccaagggcgcgatcgacacgatggtgaagcactttgcctcgctgctcggaccgcgcggcatccgcgtcaatgccgtggcaccgggcatcatcgacaccgacatgtcggaattcgccaagacggatgggggccgcgattatgcgctcaagatgcaagccctgcagcggatcggccatgccgacgacgtcgccgacgcggtgacttttctcgcttcgaattccgcccgctgggtgaccggcgacaccatccaggtcggcggcggctcaaagctttgacttcgggagatcagccatgaagctctatcagtcctctgcctcgcccaactcgcgccgcgtccgaatctatctcgccgagaagggcatcacgatgccctttgtccccgtcgatctcgcttcgagcgaacagttctccgacgcttatgcggcaatcaacccgcgacgcgtcgtgccggctctcatgctcgacgatgggacaaccatagcggaagtaccggtgatcatccgctatctcgaagaactgcatccgatcccgccgttactcggaggttcgcccaaggagaaagcgaccatcgccatgtgggagcgccgaatggaactggagggcttcgcttcggtcatggagaccgtgcgcaacggagcccccggcctcaaggggcgggcgatcgcaggtcttcacggctacgatcagatccccgaactggtcgtccgtggccggcgccggatcgccgatttctacggcgacctcgacgtacggttgtctgagacgccgttcgttgcgggtgacacgttcagtgtcgccgacatcacggcgatcgtcgcaatcgacttcgccagcaaggcgctgggactatccacgccagacgaacacggcgctacgcgccgatggtacaattccatcgcttcgcgccccagcatgattgcctaaagcgcgatgagattggattgaatcgtctttgctccccgcttgcagcaaagccgaaagcttacgccaccgcgccgatcccgacgacatcgatgccgtcgacgcggccgcggatcggcagtcggccgagatcgctcaccggaaatggcggcggcgcggtgaagcgggccatcgccgcgcgtgaggcgaggaagccgccatcgaccttgcggctcagttcctccagccgcgcagcggtgttcatgacgtcgccattgaacacaatggccggcttgacgtcgccgatctcaccgacgatcacgggcccgaaatgcaggctgccgcggatctgcggcacggcgccgaattcgcgttcgaactgcggcgccgccttctgcagtgcgttgcgcatcgccacgaagcagcgcagcggccggcaatcgaccgcgccgagccgctccggccaggtcacgatcacctcgtcgccgacataattcagcacctcgccgcgatagtcgacgactgattccgtgagcaagcgaaacgtgcggtcgagaaagcggtgaatacctacaccgccaagccgctcggccagtccggttgatcccgcgatatcgacgaacagcacaaagcggtcctcctcgaccggagaatgatagcggccagtgacgaagttcatgaagacacgcgggccgatcagggtcgcgatgctgaagccgaagttcagcaccagcgagatcgcggcggaataggcgatgctgaaccaaaaatccgtgatcgaggtttgatacggcaacccggccacgcgctcgccgacctggagcagctggatggcaatgataatgaccgcatatacggcgctgcgaaccgccagaagggcagtgaaagacagacgattgagccgctccgacagcgggccctgaaagacgaataattcgatcccgccaagcaccacgcaggttacaaaggcgtaggcaaatcccgcaatcatcgccgccatggagtgatggccttgcgagagattattcacgacgctcgccaccgcgccggcgacgataatagcaccgagagtgcgcagcttccgctcgagcttcgcgttcatgcctcgcctcgacgaatgcgtctaacccgtcccctgatcgaacgccttgcgcagcgtgacgtagccggcctgctgctggctccagttgcggccgccggtgatggcgccgtcgacgacgaggtcgtggccgttgatgaagctcgattcgtcactcgccaggaacaccgcggcatgtgcgatatcgtcgggcagaccggcgcgcgggatcggctgcgccgccttgtagacctcgcgcatcacggcggcggtcttctcggcggcgtcggtcggcagcccgagcgccttgccgaaaatgccggtggcgatcgcgccgggcgagatcgagttgacgcggatgccggactcgccaagctccatcgccacgcatttggtgaaatgaattaccgcggccttggcggcgccatagaccatcgatgaggagaaacccgcgaggcgcccggcgatgctgccattgttgatgatgctgccaaagccctgtttgcgcatggtgggcgcggcatgcttcatgccgagcatcacgctgcgcaccagggttgccatcgcggcgtcgaagcgttcgacgtcgaggccctcgatgccgccggtctgcgccgggccgccggcattgttgaacagacagtcgatccggccgaacttctcgaccgcaagcgcgatcagcgcctgcatctgttcctcgaccgtgacgtcggtctgccgaaacacacaattgctgccgagctgctgtgccagcgcctcgccttccggcgcacgacgcccggcgatcacgatccgcgcgccctcggcaacaaacacttcagccgttcgcaacccgatgccgctggtcgcccccgtgatcaccgcgaccttgccgtctagccgtcccatgccggtctccaaacccacgtttgatgttgcggatattcctcagcctcttcctgcaacgcaagcgcgggcacggttaacggctggcgaggtccgcctgtggccagaaggccacaactgcggtttttcggtcgcagcggccttattttggttcgcctgttcacgtgaactggaacgacggatggcgaaatggatcgacgaattcagggcgggttggcggggcgattcccagccttcgatgccgcttgcggccggtttcgccgtgctctgtctcgttttggccacggccgcccgcttcggactcgcccagatcagaccggacgtgttcttcacgccgtatttcccggcggtattcttcgcgaccgcgcttggcggcttccggatcgggatcgcatccgcactggcgagcggcctgctcggcgtcatcatcaatttcagcagcgggcatgccgatccggcgcgctttgcgctgctgatgattttttgggcggtgtgcggcatcgcgatctggggcgtggagcactaccgctccctggtcgcgcagcagcgcgaggtgtccaagcggctgctcgaagaggagcagtaccgcaagatcgtggtcgacgaattgcagcaccggctgaagaacaagtcatcgaccattcacgccgtgctgcatcaggcgctgcaggaccggcccgatgtctggcagcgcatcgaccatcgcatccgcgcgctttcggcgaccgacgatctgatcgcacgggtcgacggctatggctgcgatatcagggatttgctgcgctcggagctcggaccttacggccacgtacggttcaatctcaacggcgagcaattgttcctgccggccaagctcgcggtctcgctggcgctgatcttccatgagctcgcaaccaacgcaggaaaatacggcgccttctcctcgccgcgggggtttctgcaggtgtcgtggacggtggacgatgggcgtctcaacgtgatctgggacgaaaccgaggggccggtggtcgaggtgctcggcgaacccggcttcggcagcaagctcctgaagtcggcgctgcggccgttcgacggcaagaccgagatcagttacctgaagaccggcgttcactgcaccatgcagtgcaagcttcccaactgttgataagtcggctttccggcacagccgcattttccggtgcaaccgcgcgcgccgcaatcgctttcaccgacgactgagcccgccattgatactctgttaatgacgattgccgcgacggcttgcgaaagcagcccgggtctctttctgtcacggcatttctcaggtccgcttaaccaaaactacaacggactttgccaaggtcggcacatgcatagtttcacgaaagacgattttcaggcgggcgcggcagcgaccggacaggacgacatttccggaaatgaactgcgcatcttgcgcgatctactccagctgctgccggcgggcgtgacggtccaggacgagcagggccagttcatcctggtgaacgaagcggcagcgagccagctgcagctggcggcgagcgcgagccagccggcgccggtcgacgaccgccacgccgccaatctggacatgctgcgcagcggccgtccggtggtgctcgaggaagtgctgtcctgcggcgcggccaaatacgtgtttctcacctcgcaccggccggtccagatcgccggccgcaatctcctgatctcgacctcgaccgacatcagcgagcagaaggcgttcgaggaccagttgtttcgctcggcctattacgatgaactgaccggcctgccgacccggcgcgtgatcgagcatcgcgtcaacgacctgatccgcgactccgcgcagagccatttcgcgctcgccttcctcgacgtcgacaatttcaagcacatcaacgactattacggccacgcgatcggcgatgcgctgctggtcgaactgtccaagcggctcggccacgcgttgcgcgagaccgatatcctgtcgcgaatttccggcgacgaattcctgctgctgctgaacccgatcagcagcaatgacgaggtggccgaattcatccatgtgatgcaggagcgtctgaaggcgccgttcttcatcgaggaatccgagatcttcgcctcgacctcgatcggcgtcagcctctatcccgtccatggcaggagctacgaggcgttgcgccagaacgccgacatcgcgatgtatcgcgtcaagaacaacggcaagggctcgaccgcgttcttcgacaacagcatggagcgtgaggcgctggcgcggatgaagatcgagcagtcgctgcggctggcgatcctggagaagcggttctgctgcgcgttccaggccaaggtcgacatccgcacccaggaggtcaagggcatcgaggcgctggtgcgactgcgcgacgacgagggcgtgatccaggcgccgggcaccttcatcaatctcgccgtggagctcggcctgatcgacgagctgaccttcctggtgctggcggagatcgtcaagtcgatcgacctgatcaacgacacgttcggccccacggcaacgatcagcatcaatgtcgccgccaagcaggccggcaatctcgaattcatgcgccgcttcgcgcgtgcgctcgaggagaccggcttcccgaagcgcttcatgatcgaggtcaccgaagacgcgttcgtgacccggacgcatttccaggaccagatcctgccgatcctgcgcggcatcggcgtcggcatctcgatcgacgatttcggtatcggctattcgtcgctgtcggcgctcgccgacatcaccgccgacgagatcaagatcgatcgctccttcatcaccgacatccatcagcggccgcgcagccagggcatcctgcgtgcgatcgaatcgctgagcgaagcgctcggcatgaccgtgatcgccgagggcatcgagtcctacgaagagctcacctacctgcaggcggcaaccaagatccgctatgcgcagggctattacttcgccaggccgattttcctcgaagacctgaagcccgcgacgccggtcgccagcgagagccgcgccagcatggcggcacgcgcgtcccaggacagccgccagagctattcgcgcgccaacggctttcggcggtaagcgcttgtggcagggctgtcgcatacagcccgcctgcgcagcgacgcgcagccaaaacatcgaaaacaaccccatgcaaaggagccggcggtgcgccggtactcgacatgaaagcttgacatgtcagcttgacatgtcgggcaatcaacggtattattctattattcagaaatatcacagacctcacccctctctgtggcggtcaccttgtgcgattgccttgtcgcgtgcaggaggaggcatgggcccggctcccgcggccgtcccctaggaacgccgacgcgaaacgcacggcgtcatcggcgcgcgcggcctgcatcgaaaatgccagcagcaccgaactcccagccgagaaaatccttgccccaaatctttttctcattgtcgttctccctttgaggcgcgacgcgcctcgcccgcaccctaccgcggtggcgcgcaccggcctatattgaggccggtcttacgcgaaggtgtcagccatgcagcctgtctctatcctcctgaatgtcctctggatcctgatcggcggcgcgtggatggcgttcggctggctgatcgctgcggtcatcatggcgatcaccattatcgggctgccctgggcgcgcgccgccttcaacatcgcggtctacacgctgctgccgttcggctcacgcgcggtccgccgcgacgaggtcaccggcatgtccgacctcggaaccgggccgctcggggtgatcggcaatctgatctggttcatcctggccggctggtggctcgcgatcggccacgtgatcacggccatcctgctggcggtaaccatcatcggcattcccttcgcctgggcgcatctcaaacttgccggcatcgcgctgtggccgatcggcaaggtgatcgtgccggcgtgaagccgaggcatcacgtcgtgggcggccagaacttcggtctgatcgaagcagaaccgaagctccggattcttatttgacgcgttttcttcaggcgctcccgcggtccacttcgcttgaagacgctctagagccaatccttcgtcgtctgcgaacaggcctggaaatcgcggcgccaaatgtacccttgaccaccgcagggcggccgtgggcgcgtggtggcgggacattcgttcctgagccgcgcgctggtgccccagccatcaaccacgcaggcgccgttgacggtgctgtggcagcctgtgccacagccgtccgcggcgttagccggggtcaggccgagcaacgcacctgccgttagaaccgcgagcaagcttgctctcatgatgctctccatcaagctgtcggtcgtgatgccccagtcgcgaagagagcgtaggcgatctcgatgccgctggccaccgcgccgccgcacacattccggtgtgcgtgatcagcgcgccgcttcgcagccggggatgtcgaacaccgcggtcaggccgcagggtgagttgagcatcttgccgccctcgtggccgacgccgggcacgtcccacacgctgtggttcggcgtgccgccgtcgcgggcggccatcgccgcgacataggaatggccgcgtgcgtaacgatacgggccttcggcttccgccatgcaggatttgtcgagcgcgggatgatcggggttggtgtcgagcgttcccaggagatagatcacgcggcgcccgacataggcctgctccagcgcggccggggtcggctcggcgagatagggcggacggtcgtccatgccgaatttccagctgttatagccttcacacttcgccgcgatcgcgggctccggacgctccttggtgaaatacgcataagaggacggattggcgacgacgtagcgcacgccgatgccttcgcgcagcagcacctgatcgcccttcaccgcgatcgcatagcgctgcaccacctggccgccgccggaatgaccgaacaccacgacctctttcaggttcggaaacagcttgcggtcgccgagcctggccaaaatcgcatcgagtgcgtcgaacgagctcgccgggccgggtgcgatcgcgggctcgccgccctgccagccatagatgctccagcgcagcgtcgccgctggcagcttgaacgcctcgacatcgggttcgatcaaaaactgcggcgcgatcatcagcgtgcgcttgccgacatcgccggccgccgcctgcgcgctcagcgccgcgcggaaatagtcgtcggcattgcgcagcacgccgtgcagcaccagcaccgcgcgggtgacgtcgggcagcggattggaccagtcggccgaaagataaagcggaaacgtcgcgttgccgacggcgatgcgcccgctcgcgatctccttgaccggcttcatgtcgcgctcggtctgcgccggcgtggccaacgcgaccggtgcgtgtgctgccgtcaaggcgagcagcgccaatgccgcaagccagccccgatgatgcatgttcaactccgttgtgctgcaagcccggcgggatcatgccgcgtcaggcgccgtttcacccgtgaattttcggaaagttttcggatcgcgcctcacgccgcgaggcgcccgcgattgttcgcagcgaggatcgggcggatcaggcggccgaaccgctcggcctcctcgtcatgcagatagccggacaggcagaacgagtggcagccggcatcgatgaactgctgcaaggtcgcggcgcattgctcgggattgccgaccacggcgatgccggcgccgggccgcaccttggtgattccggtccacagatgcggcatcagcaggtcgccgtagtcgcgcgcgagctgctgcacgcgctggttggcctccgagcggttgtaaagcgtcttcatctcctgcttctgccgctcggtggcgtggcgcaccagttggtcggccacctcccaggcatccgcctcgttctcgcggcagatcacctgcagccgcatgccgaagccgatcccgtcctcgcggtcgtggtcgcgcgccatccgccggatctcggcgatattctccgcgatgcgctccggcagatcgccccagaacagatggacgtcggaatgcctggccgagacctcccaggcctgccgcgagccgccaccgagatagaatttcggaaacggctgctgcagcggacgtggccggatatgcgcgcccgagatggtgtgaaacttgccccggaaggtcaccggcccgcgcgtcgtccacagcgccttcaggatcgagacctcctcctccatcagcgcgtagcgctcctccttgggctgacgtacgccttcggcctcgacctcgctctcgttctgcccggcgatcaggttgatgcagatccgcccgcccgacatctggtcgaaggtcgagatcatcttcgccatcaagaccgggttgatgtagcccggccttgccgcgatcagcggcttgatccggctggagcgcgccgccatgaaagcgcctgatatccaggcctcccagcacacggagccgaccgggatcagcagatattcaaacccggcatcctcggccgccttgaccacgcgctcgcagagttccggcgacccggcgacctgcgcctccatcagcccataggccgtggtgtcgccatgcgtgggcagataccagccgaattccagcgggcgcatgggcaaactccctcgaaagacggccctttttgcttggacctgtcatattggcgcagacagtttacagcctggtcccggccagccaaggccgttgccgacggaggaccaatcagctaaatgaagccctgcacgcacccgtagctcagctggatagagcgttgccctccgaaggcaaaggtcacacgttcgaatcgtgtcgggtgcgccactatgggatcgacgatgatcgctcgtggcgatcctgcggccgtcgccatccaaatgcgcttagaattttcgtccgctggattccattttcttgaattccccgctgatcgtcagggatttccctcccgacgaaggggtcttggtcgctttgccggactgccgggaaataatgatcgaaagcgaagcgacctgctccttgccattgatcgtgacatttgtcgggccatcgaaggagaaggcatcctggcttactctccaacctccggctgtatcgatgtagtattgcagggtcgacgcggccatgttccagtcatcagtcgacgcgagtggaaaatcgcactccaccgctgcgaccgtggtctgcgcgtgacctgccggagccaacgctcccaaggccagaagcgatagaaacccgtttcgtatgactcgcacctatccactcctaaaaagctgccagtgagtgaccccgcaacatagcccctcagcgcaaccgaggcgagcgctccacaaggacggaatagcttccaagggtgacacgcgtccggtggtctgtaccgtaaaatcacggaggcaccggccctcttggccccgcatcgcgacgcgttaggcgcggaccgcgctttcagctgcggttcagcagctgccaggtcgacgtggcatgcgcgatcggctcgcctgccgcgtcggatgcctgcgactgcacgaagaaggtcttgcggccccgcttcaggaaggtcgcatggcaggtgacgcgcccgccgcgcaccgcggcaagatactgcaccttcatctcgagcgtggtaccggcgcccgcgacgtgattgacgagatgccccattgaaatatcgagcgcggtcgcgagaaccccgccgtgcagcgtgccctgcggattgaacagcggcctcacggcgtcgaaggacacgatgcacgcctcgccctgataggcgatatcaagtccgagcagacgcgacaggaagaacgatccgaactcctgccgctcgtcctcggcggcgcggcgcaacatctgctcggcgatatccctcatgacgacactcttgtgacgatactcaaatgtgcgatcgcacgaagctccgtccaagatctccgaacgcgccttcgaccgcgaatctttccagccgatcgtcggtccagccgcgccattccgcaagcacctcgcgcgtgtgttcgccgagcatcggcgggggcgtcgacggcgccggcggctcgtcgccgaaccgcgtcggccgtgcgacgaacctgacgtcccccgccgccggatggcggacgctctggaccatgccgcgctgcgtcagttgcggcgtctcgcagacctcgccgatcgacttgatcgcgccgcagggaatgccggccgcgcccagcaggtgcagccagtcggcgcggcgcctttgggcgaagatcgggatgaggatcgcgaccagctcgttgcggcctgccgcgcgtttcggggcggtttcgaagcggacgtcttcgcgcagatccggacgaccgatcacgtcgcaaaacgccgcccagaatttgtcgttcgcgacgccgacattgatccagccgtcactcgtctcgaacggctcatacgggctgatggtcggatggacgttgccgcggcgcatcgggctttgtcccgtggcgaagtacatgcctgcattgaacgtcaggagtgacgccatcgcgtcgagcatggagacgtcgacccggccgccctcaccggtccggcttcgtcgcatcaaggcggccagcaccgaatgcgacgcatagagacccgtgacgagatcggcgatcgatgtaccgaccttggtcggcggccccatcggatcgccggtgatgtccatcacgccggcctcgccctgcaggatcagatcgtagccgggacgggcggcgtccgcaccggtgcgaccgaaccccgagatgctgcacaggatgatgtcagaccggcgagcccgcagcgcgtcgaagccgagcccccatttgtccagagtgccgggacggaaattctcgatcacgacgtcggccgcggatgcgagatcgagcaccgcatcgcgccccgccggcgacttcagatcgatggcacaactgcgcttgttgcggttcaccgacaggaaatacgcactctcgccgccgacgaagggcggcccgtagcggcggctctcgtcgccttgcctgggatcctcgatcttgacgacgtcggcgccgagatcgccgagttgcatcgtggcgaacggaccggagaccacgcggcagagatcgagaatcctgatgcccgacagcggctcgcgatcagacgatcgcatcggcgaggtctttcatcgacggcaccaggatgtcgggctggtgcggcgtgatgccgaacgggcggctgcgccggtcgatgaaggccgtccgcatgccggcggacttggcaccgatgcagtcgaaggcatgattggccacgaacagcacctgatcgggcttcacgcccatgatctcggccgccttggtgtaggtcgcgacatgcggcttgaacgaattggcctcagtcaccgagatcacgcgatcgaacgggatcttgtggtgctgcttcgcggtctcgagcatatcgggatcgccgttcgacagcacgacgagcttgtatttgctttgcagccgcgcgagcgcctccggcacttccggaaacggcaccagcttctcgatctcgccgacgagatagcgcacgtcgtccatcgtgtggtcgatcttcgcgcggtccatcacatgggcaactgcgcggtgtccgatctcgcgatagggcgtgtgctcgcgatgcagcagcgcatcgatcatcgaattctcgaaatgggtccgacgccaccatgtgacgaaggaattcggatcgcccttccagcccttctttgcaaggaacggtgcggcgattttaatcaggccgccctgcatgtcgacgacggtgccgtactgatcgaacatgcagatcttcacgtcgcgcttgatcgtctcaaagctcattgatgcctccttgttctgagcgattgatacgcctttcgccatcatggatgaaatggatttgtgatctgccgttattcacgttatgaatgacgaatgaaccttcgatccatcgacctcaatttgctcgtcgcgctggacgcactgctggccgagcgtcacgtcaccaaggcggcggaccgcgtcggcctcagtcaaccggcgatgagcaacgcgctcaaccggttgcgcgcgatgttcgaggacgaactgctggtgcggacgacgagcggcatgaagccgacgccacgcgccaccgaactggcggagccgctgcgccaggtgctgcgccaggtcgagcgcgtgatggcgagcgacgccggcttcaacccgggccggacggaacgcaccttcacgatcaggatgtcggatattctcgcctgcctgctgctgccgaggctcacagcggcgcgatcgccggacgcgcggatctcctacaacatcatccatctgccgcctgcgctgacgatcgatgcactggaacgggacgagatcgacgtcgcggtcagcatggggctcgaccattccgcatcgatccgttcggagacgctgctgcgcgaccgcatggtctgcctgatgcgcagcggccaccagatcaagcgcggacggctgaccttcgagcgcttcatcgcgcaggagcacatgaaagtctcgatcagcccggccgatctgcgcttcgtcgacgacgtgctgaccgagcgcggccaccgcagacgcatcgcgctgaacgtgccgcattggctggtcgtaccgcacgttctgaagcagaccgatctgctcgcggtgatgccgaggcatctcgcggccgtgctgatggacgatggccttcgaatggaggaactgccgttcgagtccgcaccgttcgactggatgctgtactggcaccgccgatacgatcagagcaacgcgaacggctggctccgcgaccggatcagggcggcttgcaccggtctgggttaggctccgatatccgccggcctccgcgcgatcgacggccggcttcccgcttcggcctccgccactgccgatgcgtcctccagcgatcgccccctggtctcgaatccgaacacaagaaacaccccggcctggaccacgaggatgccggccagggtcgtcagcacgccggtcaatccttgccaggcgaagatcgcgaccacgacgtactggaccagcgcggtcgcgatccgtccggaggtggcgcagatcgccgtgccgcgaagccgatagcgcgtcgggaacagttcagggacgtgcatcgcgaacccggtcgccagcatgacatagatcgcggtgacgagcaggaagcccacggctgcgagcgcaataccgtccgccatatgcggataggctaagccgagcaccgctgccgcgatcgacgagccgacgatcgagagcctgcgtccgagccggtccgccagcacgagcccgatcagcgagccgaccggcccgcccagcgccatcacggaggtatagcccagcgaggacaccacgctgtggccgcccttgaccatgaagctcggcagccagccgatgaatccgtagaggctgaagcccacaacgatgtgcaacaggctgccgagcagcgtgcgcgcaagatacggcggctggaacagacgccagaccgaaccagcagattcctgtgccggcacgctggcgacgaccgcagagagcggccccttgcgcgcggcctccgcttcgatcgccgatagaatgtcctcggcttcatccgcgcggccgttggcggcgagccagcgcggcgattccggcatcgacttgcgcagtatccagacgaccatcgccaggatgccgacaaggccgaacatgtagcgccatccgagcgtcggaatcacccacaggccgaccatggacgatgcgaacagcgagaagttggtgatgacggccaagagcccgatccagcggccacgcgatgcggccggcacgaactccgtcagggtcgcgtagccgaccacgatctcggcgccgagcccgatgccgatgatgaagcgcaggacgatcaggaccatcatgttcggtgcgaaggccgccgcgatcgacgcgaggccgaagatcgcgaggttcatctggtaggagaagcggcggccgaagcggtcgccgaggatgccggacaaccaggcgccgatcgtcattccgacaaaggtcgcggagacgaaggcggcattgagctcgagcgtcgaccagccgtccttcagcaccgcacccaacacgccgccggccagatagatatcgaatgcatcgaggaacatgccggccccgatcagggccaggatgcgccagtggaatccacaggtcggcagccggtcgaggcgtgcgcccgcgttgatgtcgatgtcggcggatcgcgccatgccaaacctccccgtcgtcttcttgggaaccggatgctccggtcaccgattgatgacgcgcagggggtcgccgtccaattcaaaacgaaaattcgactatttggcgcggtgatgaagctgacgcggccggcatgatcgcggcacaagacatcggcgcgggtctcaactatcgtctgatgtatagcgtacgggagcgggttggcatgggatcggcgtcacaactcgacactatcggcttctgcgtattggtgacgtgaccgcattcaagttggcagattcgacgccgtcacggattggctattttcaagcggcttggagagaaacacgtcagcgaaaccaacggcctcgcgttcccgtcgcttactgcgaaagatgcgcggcctgctggagggcgttgttgaacagcgcctgcatcgcgttctgcagcgctgtgctgtcgctcgcctggaagaagaagctcgatgatgatgcgcaattttgcagggcgccggcgatattgctcgcgaacggcgcaaccatgtcggtgtactgaagcccaccgacattgatgtaggtggtatagatcacccccaccgtcgcgcccttgctcttgaggttggcgcagaccgggctccagagcagcacgctggcatagggcgtaccgtaccaggagccgaccggactcgtcagcgtgtcgtagctgcccggctgatagccaaaggcatgatcttcaacgccgtcggtcaccaggaacacgaattgaaacggcgaggcttgcgtgccgttgccggagcccgatgtcactgcattctgggtgagccattggacggcgtcagcgatctgggtgccttggtcggtcgtcggcaactgaatgccgccactctggttcgcgaagccgacatcggacgacgtctgattcagattcgcagtcagaccggaaagcttggtgaccgaattgttgaaggtgtagacggcgaacttatactgccctgagaccatttcgccctgggcctgcgcgatgatcagctgaaccgctgtcttgagcgcatcaagccgattggaggcgccgctcacatagcccgtggtatagccgggatagttgccttgggtggcctcaggcgaatgacactcgaaaccgcagcctccgttgacgctgcctatcttggtgatatcggccgcagttgcgccgatgcccatcgacggcgaattgtcgagaagcagatagaaattcacgtaggtcggcaatgtcgcggttgcagtcgatgttccactgacagaggtgaaggtgctgccgagaaggccaggcagcaggctcgtcagggtcgccgtgtagctgacggtcgccgtcaacgcacccggcgacgttgtcgttgctcccgaggccgtgacgttgacgttcaacgatgaaaccttgccttccttgacggctgccgcttgggtgttgaacatcgccgtcgcattggcctggccggtcgcccccgtattgacgtaggtcagcatcgcggggtttgaaaccgcctgcaatgcggccgcgtcggcaatcgcgttcaatttggtcctgagcgaaatggccaggccgtattgaacgacgccgagcgttgccagcaccatcggcacgagagcaaaggcgaaaataatcgcgacattgccgctcctggcgcctctgaaccgcttggctaccgacaacagtctggtgagcggtcgttgtgccgacatctgccgcttcatgcgtctatggtgaaatgcgtgcaacgaacgcgctgtttcgcggcgaaacataaatcgaatcggaaagcgtgatcggaccggtgatgaaagaaccgaacgcgggcgtgaaagtgtagctcacggtggcgtagatcagatagctgttaggaacagcgagtgccgaggggagcgggaagctcgaacccggggtgcgattcgtactccagctcacagtggcggcgccggacgagctgattgcaatttgcgagacattcgatgtggcgggtgtgctggaatacggtgcgagcaccgccgcggttgctcccagtatttgggccatgtcggtatcgtgtatcggctccgacgtgctgttgtactggttggtgatctgcgccagcgttgcggtggcaaagtgggtcttggtgtagatcgcgaccgccgtgccggcgtcgtagaatgccagaagcaagccgatgagaagcggcagtatcatgccgaattcgatcccggcgacgccgcctgtcgaggcaatgaaacggcggtgcattcgagcgcccatgaccgtcacggctccactttgaaggcggttatccccatgatgagggacgttccgttggacagattcggacggataagggcaaacggaccggtgatgaccggccattggtacagcaaccgtacgaccatgatctggccggcagtgcctgggttgtagctccagccgttggtgacctgaccttgggcgttgtacgtcaacgttggcatcgaaacgttggctgcgctgaacgaggcataggtgttcacgtcgaccatcaggctgccgcaattgaacaaggcctgaatgctcgggcacacccgggaaacgaactgtgcctccgtcaggttactggcctgagcctgccccgttagaaacgatcgcccggattgaacggcggcagcttgcaggacgttctgggcaaaaaaatagataccggtttccagtatcgagatgagaagtccgatgaaaaggggagcgagaatggcaaattcgaccgcggtcgaaccacgtccctcgcgcaagaagcgccaaatgcgatgcgaccgccgaaaccctcgacgtcttgaatggctggacatatccgtcacaaatgcgccccgctttccgtgtgcggcggctcgacctgcctgggctcgcgagagcggatctgtcccacagcattgccaaactgcttgtcggcatcaccaagccgcaaccgcggctggcatagccggtcgcagtcgacataagtcccgcgctcctgcccgcgatagaccgtgacggcggcgtctgccgcctccaagacccgcacggtcgacgtggcgacgacttcgccggcattgccgagcaccatcatacgcgtttcgccataggagattcccgtcagcaccgcgcgatcgccttcaggcagataagtcgcgcgaacgatccgcggattgtcgaacacgaggatacgccgccgtgccggcatctggatcagcgttgcgtgatcaatttcgacgacgattggcgccatggcttcgaccgcaacagccgcgtcgcctgtcgcaagcgatgacgccgccgcaagcgccaagcagcctgcggccagccacggcatgtgaccccgacggcggcggcgaaccgctgtgtctcgaagcgaccactgccgggccaagccttgggtgcagggaatcatcgcgggttcaaggaggttgatcttgaccaatacggcagggtggccggcttcgtttgagcaagctacgcttcccgcattatcaacgactgaagggagatgtcggatttcggcaagccggtgtttctacgggaacgcccatttggatcgtgtcgggtacacaagcgacccgtcactcgggagacgacggtgctcagtcgatcagcacaaatctctggttcttagccgcggagtcgcagcggtgctggcgctgagtgcgcagccccctcctgtttcatgcgagccgcatggcccgtgttcgaacgccgagcgcgcatgatcgcgttccatcctgacaccaagctgaattgcgtttgccgctgctaacaatttcatggccgcgcgatctcgtgatcgcgcatcgacaccgacattcacaacgggttcatgtcgaggcgcctattcgactccgaagccgggggaagaagattggagtatgtgccatgcgccgcatcgccggattgcctttcgccatagctctcagcctctgctgtctcttgccgcccacccctgcccgcgcgcagatcgccatcggcatcggcatcagcgtcgatgtggccccgcctccattgcctgtctacgatcagccgccgattcccggcgacggctacatctggaccccgggctattgggcatggagcgacgataccggttactactgggtgcccggcacatgggtgctgccgcccgcacctgaattgctatggacacccggctactggggctggaacgatggtgtctacgctttccacgccggctactggggagcgaccgtcggcttctacggcggcatctcttatggcttcggctacaccggtctcggctatgagggcggctactggcgcggcggcagcttcttctacaaccgctccgtcaccaacatcaccaatgtctcggtcaccaacgtctacaacaagaccgtgatcaacaacacgaccaacatcagctacaacggcggcaccggcggcaccacggtgaggccgacgccgcagcaactctcggcaatgaacgagcaccacgtggctgcgaccgccgagcagacccggcacgccgaagcggcgatgaaggatccggcgctgtcgctcgccaacaatcatgggcatccggccgtcgccgcgaccgcgcacgccgcacacttcagcggcgcgggcgtgatcgccgcgcgtccgggcaagccgatcgcggcaccgccgccccggcatgcacagcctgcggcaggacacgccttgccgacgggaaatgccgtaccgccggggcacgcgctgccgagcggaaatgctctgccgccggtgcatgcgccaccgacaaaccacgcacaaacgacgggaaatgctccgcccgcaggccacgctctcccgacaggaagcgcgctgccggtagtgcacgccccaccaacagaacacactcaaacgacgggacacgctccaccggcaggacacccgctcgcgacagcgaacacgctggccggcgcaggcaaccatcccgcaccggcgccgcacgttgccgcaccagccatgcatgcgccgaggccgcaggtcgcacataatgcaccgccaccgccgcgcccggtcgcgcacccgccggcgccgcgcgtcgcgcaacaggctgtgcaccgcccgccaccgccgcgccggcctgcgccgcatgtgtcacggccagcaccgcggccccatcctgcgccacgcccgcatcctgcggcagcgaggccgcatccggcgccacacaggcacgcatgatccagtgcatcggcgtgctcgcaagggcacgccgatttgagatagagaccatcggaagcagcgcggcgcgaagtgcgccctcaggtcagttcatccgcggcatcgctgatcgcggcgtagatctccgcgagatccgcttccgtgacgcagtagggtggcatcaggtagatcgtgttgccgagcggccgtagcagcaggtttcgccgttcgaagaaggcctggagttttgggccgatgccggcgagataaccggcatcgctggccttcaggtcgagtgcggtgatggtcccggtgcggcggacgttttcaaaccgcgtgtcggcatggaaggacgcaagcatccgctcctgcatcgcggcgagcgaggcgacgcgcgcgtccgcgccgtgttgccagagctcgagattcgccctggcggcggcgcaggcgaccggattcgccgtataggaactggaatggaagaaggttcgcgaacggtcgctggaataatgcgcgtcgtagatctcggcaccgcacaacgtcaccgcgagcggcaatgatccgccggtcagccccttggagtagcaggcaatatccggcctgacatcggcctgctcgcatgcgaacaaggtgccggtgcggccccagccggtcatcacctcatcggcgatgaacagcacgccgaagacctcgcagatgcgcttcatttccttgagcacccaagcgggatacatcagcatcccgccggcgccgaggatcagcggctcgacgatgaacgctgccgcagtttgctccctgcatgccgcctcgagggcatctagcgtggcctgctcgcagccagccgccggaaacgggatcgacgcgacgtcgaacagcagcggctcgtaagccttgttgaagacgccccgcgcgccgaccgacatcgtccccacggtgtcgccatggtaggagtgctccatgacgatgatccgcgtgcgcggcacgccgatattgtgccaatagccgagcgccatcttcagcgccacttcgacgctggtcgagccggagtctgagaagaacacgtagtcgaggccatcgggcgcgagcttcaggagctgcgccgcaacggtttcggccggatcgtgggtgtggccggcaaagatgatctgattgagctgttccgcctgctcctggatcgcgcgcacgatatgcggatggcaatggccatgggtcaccacccaccaggacgcgatcgcatcgatgatgcggcgatcatccgcggtgtagagataggcgccctcgctgcgcacgatccacgtcatctcgccatgcagcgcatgctgcgtgaacgggtgccagatcggtgatttgcgtgcgggcatcatggattgaaatcttcgcgccggaatgaatccctgaatgccgcttgcagcgtgtccgccgtgagcggcgacagcaacggcaaccggcccagccggcgcacctgcccgaacgcgcagatggcgcgctcgctttcgggattgctctcgccgatgaaggcgatcccgaggatgtcgatccggcgcttgcgcagcgcctcgaccgacagcagcgaatgattgatggtgccgagcgccgtccgggcgcagagcacgaccggcagctgccagcgctcgaacatgtcgatatagagcgtgtcgtcgttcagcggcaccatcagcccgccggcgccctcgatcacgagcggccgatctcctgatgtcggcacgtcgagtgcggcgggatcaatgcgcaccccgtcgatcgccgcggcctgatgtggcgacgccggcgtgcgaagccggtagcgttccggcacgatgcgatcggccgggatgccgccaagccgcgcaaccagctgtgcatcggtctcctcgtcgagccccgactgaaccggcttccagtagctcgcgccgaggaagccggagagacctgccgagaagatggtctttccgatcccggtatcggttccggtcaccacgatcccattgctcattgcggccatccgttggtctccgcgacaagcgcatcgagcagcgcccgcacgtcgtcctcgtcgacattgagggtcagcgcgatccgcaaccgcgcggtgcccgccggcacggtcggcggccggatgcccctgacgtcaaagccgcgggcctgcaatgctgaggcaagctgcatcgcgcgcgcattgtcgccgacgatatagggcacgatctgcgagcgcgacgggctgcgccagccgcgcaggtcgagctcgcgatgcgtgaacgcaaccagctttgccaggcgctgctggcgctcgggctcctgttgcaggatcagcagcgcctcgcgcacggcaaccgccgtcaacggcgatggcgcggtggcgaagatgaacgggcggcagcgattgaccatgaagtcgcgcagcacggtcggggccgtgaccagcgcgcccgcggcgcccagcgccttgccgcaggtatggacgatcacgaggttatcgcgcccttcatagggggccgtgagcccacgcccctgctcgccatagacgccggtgccgtgcgcctcgtccaccatcaggaacgcatcgtgccgatccgcgatggcgatgagctcgtcgagcggggcgatgtcgccatccatgctgtagacactctcgatcacgatccagacccggcccgttccaccctcggcgcgccagccgcgaatggtatcctcgaccgattgcggatcattgtgcgcgctgaacctgaattcggcccggccggcccgcgcgccctcgtgaatgctggcatgcaccagggcgtcgagcaccagcagatcaccgcgctgcgggagcgtcgtcagcaccgcgaaattggcgacatagccgccgccgaaaaacagcgcggtctcgacacggaagaacgcggcggcttcagtctccagccgttcgtgctcctcgcaattgccgcgcaaaagccgcgagccgccggcgccgaccggcgtgccggcctcgagcgctgccgcgaccgcctgcttgatgcgcggcgcgtttgcgagcgccagatagtcgttggagacgaaatcgatgcccgcgcgcggcttgaggccgcgcagccgatcgtccttgctcagggcgtgcaaggccgcggcgtaatcagcggcgttggccgcatggattgcgctcatgcttctctctcggatgcaaggttggtcgcgcgcggacttgggccgcgcgctcgcggaagattgcgatcaggcgaggcgggaggtgatgccgagccgatccagcaggtcggcgtcgcggtcgcgctgcgggttcttggtggtcagcagcacgtcgccgatgaagatcgagttcgcgccggccaggaagcacatcgcctgcagttcatcggtcatgtattgccgaccggccgacagccgcaccacactctgcggcatcatgatccgcgcggttgcgaccagccgcaccagtccgatcggatcggggcgctcggcggtgtcattgaccggcacgcccttaacctcgttccacaggttgatcggcacgctgtccggatggctgggaagattcgcgagcagcatcagcatgccgagccggtcatcgacctgctcgcccatgccgatgatgccgccgcagcagaccttgatgccggcgtcgcgcacatgcgccagcgtatcgatgcggtcctgcaaggtgcgggtggtgatgatcttgtcgtagaactccggcgaggtatcgacattgtggttgtagaaatcgagacccgcctcggagaggcgctcggcctgcttcggcgtcagcatgccgagcgtgacgcaggtctccatgccgaggcccttcaccgcgctgaccatgtcgcagacctgatcgagatcgcggtccttgggactgcgccaggccgcggccatgcagaagcgggtagcgccggcatccttggcgcgctgcgccaccgcgaccacctcgtcccgcggcatcagccgggtcgccttcaggccggtgtcgtaatgcgcgctctgggagcagtagccgcaatcttccggacagccgccggtcttgatgctgagcaggctcgcggtctcgacgtggttcggattgaagttggcgcggtggacgccctgggcctggaacatcaggtccgcgaacggcagattatagagtgcctcggcctccgcccgctcccaggtcttgcggggcggagcgctgttgcggctgtcggtccgttcgatctcaacgacatcaaccatcgggcttgccttctcgtttgtgatacatcatagataatcaataagattatctatgatcactctcttggaatgatgctagctgaggccgtgtggcagtgcactcgtttttatgatagataatctatgatggacgaaggcgagaacacgacgaccgccgggcgcattgccgaggtgctcgctgagggcatcatcagcggcgcgctgccgcccgatgccccgctccggcaggaccatgtcgcgcgggaattccattccagccacgtcccggtgcgcgaggccttccggcagttggaggcgcagcatctcgtcgtcgcggtcccccgccgcggcgtgcgggtcgcgccgctcgacaccaaatcggtgaaggagatcgccgagatgcgcgctgcgctcgaggtggtcgcgctgcgcaatgcggcgccgaaattcacctcggccctcctggcgcggatcgaggtcgccgtgatcgaaggcgacaatgccgagacggtcgaggaattcgagttggccaatcgcgacttccaccacgcgctggtggcgccctgcgcgatgccgcggctgctcgccagcctcgacggcttgcagctggcgaattcgcgactggtgttcgcgatggcacgcaatgccggctggcggccacggccgagccaggatcatcgcgtgatcttgcaggcgctgcgcgcccgcaacatcgagcaggcctgcagccttctggcgcggcatatccagaccatcgagcggcttgcgctgtcggcgtcgtgacagaaatctgcaatccgctagatcgggatgacgttaggttgaatcggtttggccacgaacacgattcacctctcccttgggagaggtgaacttccgacgccgttccagctcaacctgatcccatcccgctttaggcgattgcgacgatctcgagttcctgctcgcctgagcccgcgacgtcgcccacggctttgcccatcagcgaccttgccaccggcgagacgaacgagatcgagcccgccttgggatcagcctcgtcctcaccgacaatccggtaggtctgcacgcggccgtcggcgcggctgaaggtcaccgtgctgccgaaggcaacggtttcggtcgatgcaggatctgcgacgacctgcgcagtgcggagccgctcggtgagatagcgcgcgtcgcgcagcggaaccgccgattgccgccgccgttcgttgacgtcgtccagttgctgcgcggcctcataggccgcgcgcgcctgctggagctgacgttccagcgctttccgtcctgcctccgtcaccagattgggatgcggcgaaatggggcggtctggcaacagcgtctcggacgcggtctcggcactttcttccttggtgaaggcaacgctcaatccggaactccatcgatgaggcggacagtatagcgccgcctcgcggaccccgctaatgcgcgattggattaggctggagcttagtgcgacgccggttgttccgccttgctccgtcggccgaagcggttcttcacgccttcgcgccaactctggaaagtgacgaacagcatcggcaccaggaagatgccgatcgagctggcggccagcatgccgccgaacactgcggtgccgaccgcacggcggctgatttccgcagcacccgtcgcgaccaccagcggcaccaggccgaggatgaaggcgatcgaagtcatcatcaccgcgcggaagcgcatttgcgcacctatcgtcgcggcctccgcgatcggcctgccggcctcgcgctgctccttggcgaactcgacgatcaggatgccgttcttggcggcgagcgcgatcagcaccacaagcccgatctggccgtagagatccaggttgaggccagcgagcttgatcgcgagataggagccgaacacgccgaccgtcaccgacagcagcacgggaatcgggatcgtccagctctcatacagcgccaccaggaacagataggcaaacagcaccgcgagcgccaggatgatgccggtctggccggaagccgcctgctcctgataggcggtgccggtccattcatacgagtagccggccggcaacgtcgtcttcgagaggtcggccatcgtcgcgatcgcggtgcctgacgacacgcctgccgcggggctgccgttcaccgtgaccgagcgataattgttgtagcgcgtgatcacctgcggaccggtgacgatccgcaagcttgcgatcgagcggatcggcaccatctcgccgccggtattgcgcacatagatctgccagatgtcgggaatgtcgcggcggtcggacgcatcgccctgcacgttgacctgccaggtgcggccgaacaggttgaaattgttgacgtagataccgccgagcgtggcctgcagcgcagtgaagacgtcggccatgttgaggccgagcgcctgcgccttggcgcgatcgatatcgagatagacagatggattggtcgcggtgaaggtcgagaacacgcgggtgagattcggattgcggttggccgcgccgatcaacccgcccatcacgctgctgagcgaagccgggtcctgtccctccagcgcctcgagctgatattcgaagccgcccgaagtcgagagcccgatgatcggcggcagattgaacggcagcaccgaggcctgacggatctgcgttccgccgacgaaagtctgtccgatcgcggcctgcaccgaatccgtgacggccttgcggtcggcgaacgccttcatccgcgccaccatgaacgcggagttcggctcgctggcgccgtcgagcaacgagaagccgataatcgacagcacgtgatcgaccgccgggttcttcttcaacaacgcttcgacctgcttggtcgcctcgctggtgcgcgccaccgaggcgccgtcgggcaattgcaccgcgatgaagaacgcgccctggtcctcctcgggcaggaagccggtcggcgtgatcttcgacacgccgaacaccgcgccggcaaacaccagcaccgcgaccaacgacaacaccgcgacgcggaccagccgctgcaccacgccggcgtagcggtcgcggacccagtcgatgctgccgagcacccgtcccatgatgccgcggcgcggcccggtgtggcgcaggaacaccgcgcacagcgccggcgacaatgtcagcgcgttcagcgccgagatcaccatcgcggcgctgatcgtcaccgcgaactggcggaatagcgtgccggaaatgccggggatgaacgcgatcggaacgaacaccgagagcagcaccagcgagatcgcgatgatcggcgcggtgatctgcgtcatcgccttcttggtggcgtcggccggcgacagctccggctcctcctccatgacgcgttcgacgttctcgaccacgacgatggcgtcgtcgaccacgatgccgatcgccagcaccatcgccaatagcgagaccgtgttggcggaatagccgagcgccagcagcaccgcgaaggcgccgatcaggctgaccggaaccgcgaccgccgggatcaccgtggcgcgcagattgccgaggaacaggaacaccacgatcacgacgagcacgaaggcctcgccgagcgtcttcatcacctccttgatcgtgtcggagacgaaggtcgtggagtcgtactgcacgaggtaggtcaggcccggcggaaaccgctccgacaatttcgcaagcgtcgcctgcacggccttggccgtcgtcaccgcattggcgccgggtgcgagatagatgcccatcggcacgccgggattgccgtcgatccgcgactccgaatccatgttctgcgcgccgatctcgacgcgggcgacgtccctgatccgcagcaccgatccgtccggattggcccgcagcacgatgtcgccgaactgcttggaagtcgtcaggcggccctgggtctgcacgttgaactggaactgctggtcgttgctgatcggacgcgcgccgatgcggccgaccggcgcctgcacgctctgggcacggatcgcggcgatcacgtccgacggcgccagattgaggctggtcaggcgctgggtgtcgaaccagatccgcatcgaatagttcagcttggcgaacagcgaggcctgcccgacgccaggcgtgcgcgagatcgcgtccagcacgttgatgatggcgtagttggtgatgaacagcggatcctgctcggcgctcttgctgtacagcacgatgaactgcagcacggccgaggacttcttctgcacggtgaggccctgtgcctgcacctcggtcggcaattgcgcgagcgcgctctgcacgcggttgttgacgttgacggtgttgatgtcgggatcggtgccgagcgcgaacgagaccgtcagcgtatagctgccgtcattgccgctggtcgacttcatgtagagcatcttgtcgacgccgacgacctgcgcctccagcggctgggcgacgctggattcgaccacctcggccgacgcgccggggaacacggccgagaccgtgacctgcggcggcacgatgtccgggaactgggcgaccggaatctgcatcagcgccagcgcgccggcgatcgtgatcacgaacgcgatgacgatcgcaagccgcggacgatcgacgaagacagcggaaatcatgggttgctacccgtcgatttcggcgcgctgccggcgccgccatcggcggaaaccttcatgctcgactggatcagcgcgctggccggccccggcgcgaccacctcgcccggcttgaccttctgcaacccctcgacgatgaccttgtcgccaagcgcgatgccgcttgtcaccgccgcgatcgtcgaggtcgattgcccgagttggatccgcttctgctcggccttgttctccgcgccgacgacatagacatactcgccctgctggtcagacagcaccgctgagcgcgggatcgccagcacctcgaccggctgcacgccttccagcaggacggtcacgaactcattgtcggtgagctcgcggagcgagccgcctgttgcggccgaggtataggtcgatggattcgggatggtgccgcgcaaggagatggtgtcggtgttctgtgcgatcgtgttgttgacgaaattcaattcgccggtctgctcgtagagccggccgtccggcaggcgcagccggatgacgacggccttgaagccgccgcgggtcacatagcgttcgcgcagatcgagtgactcgcgcaccgacacgggaaaggtgacatacatcggatcctggctgacgatggtggtcagggttcccgagctcggcgtcacgacgttaccttcggtgaccgcggtgcgtccgatcctgccgtcgatcggcgaatggatctcggtgtagtcgagattgatctgggacaggtcgacctgcgcctgggcggcctgcacctgcgcctcgaggctctgctggttggcgaccgccgcatcgacattggattgctggccggccggaccgcccatcagggccttggcgcgatcggtggtcagcttggcgttgaccagcgtcgcctgcaactgggcgacctgcgccttcttcgatgcgaggtcggcctcgaacgggccgcgctcgagttgatacagcaggtcgccggccttgacctcggcgccctcgacgaagtttcgcttgtccaggaacgccgtgacgcgcgccaccacgttgacgcggttgggcgcctcgatacgtcccaggaactcgttggtttcggtgaccggccgcttcaccgcctcgaacacgccaacggcaggaggcccgggcggccccgcctgcgcatgagccgctgaaactcccgccaccgccaatcccgccgataccagaaacctcgtcagtccaccgaagcttcgttccgtaccacccatgctgctcaacccttcggctaacaagctctacgagacggatatgacgtcgacgtccctcagacccgggaaggtcagggatcggcaagatgcgttgcagcaaatcataacgagtccaatccgacaatcctgtaaccctggttccgggtttgggccgacgacagcggattggagggacggcggaccgcatgagcatgcgtgtcggccgccgatcaacacagtcgcctcgatttgagcggcgacaacggcgcatcgattgacatgaatcgagtgccgtcggctcgacaggccatcaaagcctgatgacgaccataccgaagtagcggccccgcgcggtatcagccaacgcgagtgtggcttgctccagcccgtcgatcacgacatggggaagagcgatatcgccggagcggcaccaatcggccagacggcggaaccactcgtcgcgtgcttccggattgtcgtcggcgctatagccccggatggtgatcttccgtagcaggatttgggtggagtccaacacgacaggcgccacacgcccggttccggccgcggctagctgccccgacaatgtccccgtgatgacgaagcgcgcatgctcgcgcgcgacggccacggcggcctgcaactgctcgccccccacattgtcgagaaagacatcgatgccgtcgggcgccgcctcgcgcagttgcgcaacgaacgacttgtcggtgccgcggatcaccgcggcgtcatagccgagctcggcgaccagccgatccgctttcgccgatgcactggtgctgccgatcacgcgccccgccccgagcagtcgagcgatctgcccggccatcgagccgatcgctccggccgcgctcgatatgaagacggtgtcgccggcccggatctgcacgccacgcgtcagcgccgcgtgggcggtccagccatgcccgagatagccgaggtaaccgagcggatcgggcagcggcgcagccagccggaggcactggacggccggaacaacggcgtaatcgcgccagccgaacatgtgcagcaccatgtcaccaggtgacagcccgctgcttgtcggcgccatcacgacctcgccgatcgcctcgccgcgcaggccgtcgcccgggcgcagcgcgggaaacggaacccccggcacatcctccgcgccctggctcaccatctggcggagcgaagccgataccaggaagcagcgattgcgcaccaacacctcacccgcgcctgcaaccggtagcggctcgtccaccagctcgaaatgctgcggccccggcagtccctcgggcctgatcgtcagcctgacctcgcgcgcggtctcccccgccatcatgaatatcctttgacttgatccgcccgtcggacagaatgtgagcactatgctcacattaccggcggagaggcgcgcctgaccactcgcattccgaaaccgacgagcacgatgcggaaagccccgcgacaggcccgctcgcgcgccaccatcgagatcatcctcgagggcgcggctcgcattctcggcgagcgcggctgggccgcgacgaccaccaacgcggttgccgcgacggcaggcgtcagcatcgggtcgctgtatcagtattttcccaacaagctcgcgctggtcgaggcggtccggcgccgtcacttcgacgaggtgctggcggtgctgcgcgcagcgaccgacgccgcgacgcctcgggcacgccgtgtcgccgcgttcgtcgacggcatgatcgcggtgcatcgtcgctttcccgccgcgcaccgggtgctgctcgaggaagccccccgcgacgcagccagcgaggccacgcaccgccggttcgagaccgagtatcgcagcggctgcgacgcgttcttcacggccaacaggcgaggcgacaccgccgtggatagcgcgatcgccgctcaggtcctcgctgccgcggtggcgggcgtcgtccacgatgcggcacggctcgggttgctcgcctcgccgctgttcagacgggaactgatcgcgctggtcgaatccagcctggccagacggcgcgccgcggccgaccgatgatcaacggttttggcgatgcccatccgccgcggggcgcacaaggacagcacccgcggatcatcacaacgcaacagcgttcttcaggcgcgaggtgacctggtaggcgggtgatgccagctgctcgtacagccatggccgcgcgcgcttgccgccaacctcgtgcacgccatcgaacagcgccatctcgatcgaatgcggatgacccgacgctgcgtagacggactgcatttcggcgaacttctcatcacgcccgagttccgtggtgtttgcgccatcgcggctgccgatctcgacgaacagcggacacggagagaccaggtacgccagctccgcgccggcgtacttggcgcggctgttggcgaaatggatgtaggccgcaagttcgatgccgaggttcttgctgatgacggacgatgtcaggaacttcttctcgtcacgcatatatccggagacgacggtcggccgcatccgccccgtcgcggcttccagatgcagcgcgagaaaggcgcccgaggacaccccatagacgccgacatgcagaccggacattccggtcaacctccggcagaccgtttcgccggcgtcgatcgatgcgcatgacacgttgtgcgcggagatgccatgcgatgccagcatcgcggcgatgttgttctggctctcctgatttccgatctgcacgatgtaggggcaccagacgacataaccatcctggcaaagctgtttgccgagcgcgttcatgtagtccttgtcagcgtcgtcgaagcaccgctccggcgtactcgccatgccgtggccgagcaggatcaatcccttgaacgcaccgtcggggatcccgaggcatccgcgcaccggtacgccgcattccagatcgaactcgactttcacgaccgaaaaccccgcggccgtatcgcgccagagaacccgcatgtcctcgcgggatggccgatagagccgccgcgcccggaacagcgaccgcatctcccgccggacatcggggccggttgcgaccgcgcgcagctttccgcttgccgcgagatcgaagaacgaccggcagaacgtatcgtagccaagcgtcggcagatcgacattggcgcacgatccccggcagtgactgagagccagcgtgttgccggtcaccgatgaggggccgaccaacgtcatcagtaatccggaaagcgccctgcggctgatcatcggtcctccccgagccggcgacggctcgactggtgccatcaagatggcggcccagcaggcgcgacaagtcgcgcggatacaaattaaaggatgttcatggtcgaaggatcatgcgcagcgttgcaaacgtgtacgctgcccggccgcgcgctgtcgcaattcatggcaaagcgtttcgagacgcttcggaaagatgtctgattgtcacgcagactcaatctcgccttagccggcgccgaacgtcaggtcctgatcatcgggtctcgatcatcaagttttgggcttgacctcggtgaccttggcatcgggtcgctgcccagcgagcgcggccccatcagacggcgcgaagatcacctgcaaaatcgtccaagagccgcgatccatcgtgatgcgagcggtcgcaccggaatagcccggactcgtgggccagaccgaattgctctaggcattcattccgggatcgacgggttatctgttgggcaacagcgtttctggaatggccgatggcgaacgacctgcacgcgcatctgattgaactggcctatgaggccgcggtcctccccgagctgtggccgaatgttctgcatcaggtcggcgggatcgcgcgggcccgcggcatcgtgctgctgacggcggccccgcaggacgtgcgctgggtcgcctcccccgacatgcacgatgacacggttgcctatgtcgaaggcggctggcacgagcgcaacgggcggttgccgcgcctgctcgcggccaatcatgccggcttcctgcgcgatatcgacgtgttcgatacgcccgaggaagtgcagcaggatttccagatccgggaattcttccgcccgcgcgggctcggatggggcgccggtaccgcgatcccagtgccgagcggcgacgtgctgatctacagcgtcgagcgcgaataccggcacgggccgatcgagcgggaggcgatcgaacagctcgacgcactgcgcccgcatctggcgcgggcggcgctgctgtcggcgcggcttgggatggagcgcgcgaaggccgccgccgaatcgctggcgatgctcggcctgcccgcgggggtgctgcgccgcggcggccgcctgatggcggccaacacgctgttcgatcgcctggtgcccgatgtgatgcaggatcgcaccgatcgcctggcgctggcggcgcctgccgccgatgcgctgttcgcgcaggccgtcggtgcacttgatcacgggctcatcagcggcgaggtccgctcggtcccgatcgctgcacaggacgagcgcccgccgctcatcgtgcatctggtcccgatccgtggcgcggcgcgcgacctgttcgaccgcgcactggcgatcgtgatcgtgacgccggtggtgccggccgaggtgccgaccgcggaggtgctgcagggcctgttcgacctgacgccggccgaggcgcgggtcgcccgcggcatcggcgaaggacgaaccgtcgaggcgatcgccatcgccttcggaatctcccgcgaaaccgtgcgcaaccagctcaaggccgtgctggcgaagaccgggctcggccgccaggtcgaactcgccggactgctcgccggcgccaaggtgccgccgggttcgtcggcggaatagacttacgccgcgctcaggcgagcctggaagcgccccacaacccgaccgatcacgttggccgtcattgcggcggcatgctcccggcggcatcgcaagcggatcggcatgttcaaacggcgccggttgagctagtggtagctcccctcccttcgtgcgcccgttcggcgcatgtccagtgaatagagtgcatctgaatggccgaagccgacctcgacgccgtcatccggcagaccgcaagagcccagaccaaggccgtgatggcggcggccaagaagcgccaggccgtctgggtcgcgcgcgcggccaaggccaaggacaaggagaccaaggcgcgcttccgcttcctcgccaagagcacgatgctgaacgcgacggcgaccgccaagcggttgcagaattcggccgagaacgccgccgacgcctacgcccgcgcgatgaagcgggcgatggaagagccgccgccggccaaaaagcccgcgaagaagaaagaggacgcctgatgcgcttctatggaagcgcgtcatgatcattattttcgcatgatcgtttcggaaaaccggtgtccacttttccggatcatgctccaggagccttcatgctcaccgttcaccatctcggcaagtcgcaatcggagcggatcgtctggctgtgcgaggagctggagatcccctatgaactgaagtgcaccacgcgcgatccggtcacgatgctcgcgcccgccgactacaaggcgctgcatccgatcggcgccgcgcccgtcatcaccgacggcgacctggtgctggccgagtccggcgctgtcgtcgagtacatcgtcgccagatacggcaatggccggctgacgctgaaatcagatcatccagacttcgcccggttcctgtactggtttcacttcgccaacagcacgctgcaggcacagatgggccgcagcatgatcctgaaccggctcaacctgccggccgacaatccgatgctggcggcgacccgggcgcgggtcgaccgctcgttcgatctgatcgaggcgcgggcgcgcgaggcgcgctatctcgcgggcgaccaattcaccaccgccgatatcatgatcggcttctcgctcacgacgatgcgctatttcctgccctatgatctcggccgctgccccggcatcagggattatctcggccgcatcgcggcgcgcccggcctatcagcgcgcgatgcagaagggcgatcccggcatggcgctgctgctgacgtgaggccgtgatgccgcgctacgtcgccctgctgcgcgccgtcaatgtcggcggcaccggcaagctgccgatgaccgaactgaaggcgatgtgcgtcgatgcgggatttgccgacgtcgagacctacatcgccagcggcaacgtcgtgttctcctccaggctcggcgcggccaaggtcaaggccgcgctggagcagcggctgcacgcctacgccggcaagccggtcggcgttgccgtcaggagcgcggacgagatcgccgcggtgctgaaggccaatccgtttccgaaggcgccgccgaattttacggtcgcgatcttcctcgacgagccgccacccaaggacgccctgaaagacgtcaggggccagcaggacgagcaagtgcggctcggcaagcgggagatctacgtcgcctatggcagcggcatgggccgctcgaagctgaagatccccgccgccgccaacggcaccgcgcgcaacatcaacaccatcgcgaagctcgccgagctggcggcgggcgacggctagagaaagctcgtccagttttctccgaaccgtcattctgagaagcgcgcagcggcgtctcaggatgacggttaaagcgcggtttgcgttgctagcgctcgtgcacaacaaatccctcgacatcgagcctcgccagcacatcctccagatgggcgcggtcgcgggtttcgatcacgagctcgagcagggtcgccttcgccggcagatcggagaacgtgcgctggtgcgagacctcgatgatgttggcgccggcgtcggccagcaggatcgacaccgccgcgagctgcccgggccggtcgacgatgtcgagcgccagctgcgtcagccgtccctcgcgcgcaagctcacgggtcaggaccgaggcgatcagcctggtatcgatattgccgccggtcagcaccaggccgactttgcggccggcaaagcgctcgggcgctgcgagcaccgcggcgaggccggcggcgccggcgccctcgaccaccgtcttctcgatcgagatcagggtcgcgacggcgcgctcgatctgatcctcgctgaccagcacgatatcgtcgacgagctcgcggacgatttcagtggtgatccgcccgggcgccttgacggcgatgccttcggcgagggtgtcgccgcgcatcggcagctgcgtgcctttgacggcattgtacatcgacggatagagctgagcctgcacgccgatgatctgcagcgacggcttgatcgcctttgcggcggtggcgatacccgagatcagccccccgccgccgatcggcaccaccaggatatcgagttccggcgccgcctcgagcatttcgagcccgatcgtgccctggccggcgatgatcagcggatcgtcataggggtggaccaggatcaggccgcgctgctcagcatgtgcgccgacgaaggcgaagcattcttccagcgtctgtccggtgatgatgacctcggcgccgtgccgtctggtgttctcgatcttcaccatcggcgtgcccgtcggcatcacgatggtggcggggatgccgagccgcttcgcgtgataggcgacgccctgggcgtgattgccggccgacatcgcgatcaccccacgcgtgcgctcctcgggcgacagcgcctgcagcctgttcagcgcgccgcgctccttgaaggtcgcggtgaattgcaagttctcgaatttgaggaacaggcggcaaccgcagatgtcgcccagcgtgcggctttcgttgcacgcggtgaccatcaccgagccccggatggtatcggcggcacggcgtatatcggcaagggtgacgcccgctgggctgagggcggtggtatcggcaggatgcggcatcgggtttcgctttggaccgtttcgtcagacggaacctagcgggtttcggcgccgaagacgaccggctatcgcgtggtcaacacccgttgctccggccgtgccagcgcgggcagctgtgtctcatcgcatttgaggcacagcaacgcggtgcggaaatgcttgtcgagcacaatggttcgcgtcctgccgcactggcagcgcatcggcttgtccatggaaggtcggcccaggttcgagatgcaaggaaagcgtgcgcttagctatcccggtccggttaacccaatatgacttgctgccggaaaaatcagaagaaccccgcactgagatcgaggccatagcttgccctgagcaccgcgacgaacagggccgcaaagccgagcagcaggacatgccgggcgatgctgctccgaagcgaattggccggaaatacccgagcgatcgattgagccaatgcagtcatttgcgacctccagaaccacgtcccgaaggtaggtcgccggcgacgctgcgaggttcaacgcggctcgcgggacggccggcggcgcactgacgtgctcggctccgcatcacgttgcggccgcgtactgttccggaagcggcgaccgaccacgatcagcgtgcccgcggcacggactgcggtcccggccgacggggcgggcggcaggttgtcttgcgtaacggcttccagcgcgcgcagaaacgcacgtccatccggtgtgatctcccagccttcggcatcacgcagcacataaccgttgctgaagatgtcgagctcgggaacccgagatgccagacgtttgatccgcgcatgccaatcgtcgccgctcgaagagagaatggcgaggtcgtgcttgagcgaatcgatggtggctctgccgctgacgtgactggccaatatttttagaatcgcaacctgtatgctcaactcaacgcctcgaccgccacggttctttttgttctgcgcagccgatctggaaattatcgcgctgatgactccgacgtccagtcatcagcgccagttatccagaaccgcgcatgacggtatcgatttacgcaacgcgcgacgtgccgacgctgcgctcgggccggtgcgacgacatcgattcctcttcgccatcctgcggcgagccccagaattcccgcaccgtcggcccgtgcgtcaacctggtgtcgcgcaggaagccgagaatttcgtgcggccagacccgacgccccatctgcgtgtaccagcgcatggcgtgacgaagcccggcgtcgcgatgcaacagcacgcgcagcaaggccttgggtcggcattgcagcaccatctcggtaaatttgaaccagagcagcacccgccacggcggcatgtgtcgggtcgcgagcacctgatgcttgtagtcccatcggcggcgatcggtctggatcacacgtcgttctgccgcgagacggaaatagggcgtccagcgatgcggcgtgacgtagagcatctggatctgatcgggatcgtaggacagaagctgccgcaggccgcgccagtgatcgcgatcggtctcctcctcgaaaccgaccacccaggtcgccatcgacaggatgccgtaccggcgcatcaggcggatagcctcgcgatcggtcgtggtggtggtgcccttgcgaatcagctgcagcgtcttctcgtcggtgttctccatgccgagcaggaagcgctgccaacccgctctcttgtagagatgcaggatatcggcatcgcggacgatatcgtcggcgcgggtcgagccgaccaggatcagatcgacattctccgcgatcagcgcttcgaggaacgtccgccaggccttcttcgagacggtcggattctcgtcggcgaaattgatcaccttgacgccgtgctcgcggtgcagccgtgccaactcgccggcaaagcgcacgggatcacggtgccgccatcgcgtccagaaaccgcgctggccgcagtaattgcagagatgcggacagccgcgcgagaactgcacgacgacggcgcgcaaacctccccaatagctgtagcgggcgtgatcgatcaattcccagccgatgcgataggcatcgagatcgcggatgacaggcgcgggcggcgtgacgcgcggcccgtaatcatcgcggaaggcgatgccgttgatggtgcggagatcgccgccggtctccagggcccgcatcaggcggcgcgccgtctcctccccctcaccgcgcacgatcgcagtgacgtagcgctcttcgcgcaagatctcgcgccagtgataggtcggaaacaccccgccatacacgatccgcacattcggcagggccttgacgatggcctgcgccacctcggtgatgacgggatggcccgaggtggagccggaatggccgaacaagaccgcatcgggcgagaatcgcgacgcctcggccacgatggctgtgaccggcatcgggccgaactcggcatcgagaagacgaacgtggtggccgtcgtcgatcaacggaccgccgatcgacagcaggccgagcggcggcagatggtcgtcggggatccggctgccgatcgccgggtgcggcacgttgatgagaagaatgcgcatggatgatcgctcccgctttggttggcgtgatcgttcgtccccgcatcttgtgaaaggagagcccaaccccccggccgggcttgaagagaatcgaaggcgcggtccgccgcgctaaagcgcgatgagttagaggcttgccacctccgccggcgcgatcgcggtcagcccgccgaagcggcgctcgcggcggtggaaggaggcgagcgcgtcggcgagatcatcggcctcgaattcgggccacatccgctcggtgaaatgcagttcggcataggcgccttcccagagcaggaagtccgacagccgcttctcgcccgaggtgcggatgatcaggtcgacatcgcggaggccggcttcgccggtgatcaggtcggcgaaggcctcacggctcaacggaccggcgccggccgcgcgcgcggcggcgttcaggatcgcgtcgcgcgccgagtaatcgatcgcgatacgcagatgcagcgtggtgccgccatgggtctcggcctccgcgcgcgtgatcgcggcggcgatgccgtcgggcagccggtcgcggcggccgatcacggtgaggcggacaccgttgcgcaccagggctgcgatctcgttggcgagatagaaccgcaacagccccatcagcgccgcgacttcggctttcggacgacgccaattgtcgctcgagaatgcgtacagcgtcagcgtgccgacgccctggtcgggcgcggcctcgacgatgcggcggatcgcctcgacgcccgcttcatgtccacgcaggcgcgacaggccgcgccgcgtcgcccagcggccgttgccgtccatgatgatgccgacatggagccgggcgacggcgtccggcttgagcgcaacgttgctttgcatcacaaagtctccgggcaaaaaagggatgatcaaatcggctggataccgaggcggccagatgcgccttcgtccttgccggcggctttggccgcgtcgcgcaccaactgctcgagcacggcgagataatcgaggaaacggcggcggccgctcttggtcagacggcagctggtatgcggacgattgccttcataacccttgatgacatcgacgaggccggcctcctgcagcacctgaagatgccggctgagattgccgtcggtcagaccgcagagctgcttgaggtcggcgaaggcgagccccttgggatgcgccatcaacgaggtcaatagaccgagccgcgccttctcgtggatgacgcggtcgaggccatcataggcaaatggcgcggtggtcacgtcagtcttcggcatcatggcctccggaagcgaaatacaacagcgctgcgagcagcaactggccgatcgcgaatggcagtcccatggtccagggcgacagcgcgtggctctggcttgcgatcaacagcaccgtgaagcccgacaggaaataccaggcgcctccgagcgcgatcgtgcgcggcaacaggcgaaccgaggcgaacacggcgaggctgaccagcacctgccacaggccgggcagcatccacagcgtctccggcgcgaatttccattgcagcaccgcgagcaagacgccggcgatgacggcgggaacgaactgctcgatcgcctgctggaccatggcgtcggcaaggccggaatgatgccgccgcgagcgtgcctgcatctcgatccagatcagcaccgcggacagcagcgcggccgccgcccagccggcaaggaaggcgatcggatgaccggtgggatcatcgagccagagatattgggcgagcgccgtgaccagcgcgatgccgctggtgacagccaccgttgccggaccgtagccgcggaatgcggtccccgccgcaatctggctgcggatcgcaagaatgtcggccaaggccttgtcgaggtcgcgcatgattcgcccgaactttgtaatgcaaagtatacgggatcaccaagtaaacgcaagcggcaccggccgtccgcgccgcatgatgtttaacgggtggttactgcgcggattgcagcgaaaccgtgccgcctcagaccttcaccaggctagcaaagccgccgtagatcatacgctgcacattgaacggcgccgttttcggatccatcgacgcgaagcgcggatcggccatcaccttggcattgatccgatcgcgctgggcgcgcgacttgtaggtgatccaggcaaacacgacggtttcgccggccttcagcttcacgctctgcggaaacgatgtcagcttgcccggcttgacgtcgtcggcaacccactcgcgataatccagcgcgccatgttcgcgccagaccttgccggccattttcgagagcttcgcataggccttgagcttcttcttcggcactgcgacgacgaagccatcgacgtaaagcatgggcgtttccttgtcgttattgcgtcgtcatcgcgagaagcgaagcgatgaagcaatccgtacctgcacttgcggcgcgatggattgcttcgcggagcccgtcattgggcgcgcattcgcgcgacccgttgactcgcaaccacgatcaggagtgacagcagcaggatgcctgaacgggctccggttgatactggtcacgtagccgcacccagtccatcggatagggcagtccttcttcatggcggccgagcggcgtcaagtcgagatagtgataggcggcattcatcatgtcgaggccgcgcgcgaacgtcgagtaggtgtggaacacacttcccgcctcgtctcgatagaacacgctgatgccgggcagctcaggcccatagagcggggtcgttccataattgtatttggcgtcgcccgcatcgatctgcccttgtgtgaacgacacaccataatcgtagttgaagtcattctctccggaggacacccagtcgaaggtccaccccatccgctgcttgaaggcctcgagcttggccagcggcgcgcgcgagatcgcgaccatcgtggtgtcgcgcgcggcaaggtgcggaaccatgcgctcgaagccgtcgacccagaacgagcagctcttgcaggccgcgtcccactccggcgcgaacatcacgtgctgcaccacgagctgcggcctgcccttgaagagatcaccgagcgtcaccttgccgccgggcccatcgaacacatagtccttgtcgaccttgacccacggcagctcgcggcgttgccggctcaccgcttcgcgggcttgcgtcagttccttctcgctgatcatcagcgccttgcgggccgcggtccattcttcgcgcgagacgatcttgtgctgggacatgcgatgctcttttgcgcttcaggcgtcgacgtaatgttggagattgccgaggaattcggtccagccgcgctggtggttgtcgcgcgcggcctcatcgacgaactgcgcgtgatggaaggtgagcaaggtgccgccgccgtcgggcctgatcgacaccgtcacctcggagacgcgctccggcgtcgaatgccaggcccagctgaacaccagcctctcgttcggcaccacctcgcgatagatgccgccgacctcgtgatattcaccgttggtcccggtgaacttgatccggtagcggccgccgacgcggacatcgagctcggcctgtgtcgtaccgggcttgacctggcccggaccgaaccattgcactaggttttccggctcggtccacgcggcgtagactttctccggccgggcgcggaggcgccgcgtgagggtgaggctgggacgcgcggtaaggccggcgtcggctgcgactgcggatttgttggctgccacgggttttcctccacaaaagcggcaaggcggtcgagattgtcggaccagaattgcgcataccgattgagccagttcatcgcttgctccatcggccgcgcggtgagccggcacgccaccgtgcggccggtcttttcgcgcgcgaccagaccggcatccgtgagcacgtcgagatgcttcatgatcgccggcaacgacatcgcgaatggctgcgccagctcgctcaccgacaggctttcctgctcgccgagccgcgccagcagcacgcggcgggtgggatcggaaagcgccgcaaaggtgcggtccagcgtttcgtcctgatacttaaccatatggtttagtataagcgcaaacggcgcggcgtcaagcgcgcgtcttcacgatcgcgcgacgacggataggtgcgcggcgccggccggaagtctgctagtcggggtagaccgtccgatgccggcgctgatggcggcgcggcggcggcgggggctcgctgaacagaaagcgcggattttctccgcaagcgagatagcggcccgacacgctcgcgaggcactgctcgtaggttcgataggcgcattcgcccggatagcccaggctcggcccctgcgcacaccacggataatcataaggatcggcggaagcgggtgtgacgctcgccgtgccggcaagcgtcatcgctcccaggacaagcattgccatttgcgatgtgcgcatgatccgcctccttgagatgccgcagttcaagcgcggcatcctgggtaaggttcctgaaggtcattttattccgcgtcaaggtcccgcaatttgccttgcaggacagccatcgccgcgcggaccggcaacgttgaacgtccgaggcctactcgaccttgaggccggcgaactcgaccaccttcttccacttgtcggtctcggccttgatgtcgttgtcgaacgcctccggggtctggatcagcgagtcgccgccgagttcgaccagacgcttcctcatgtcgggctcggcgagaacggcgttgatctcggcgttgagcttggcgatcaattccttcggcgtgttcttcggcgcccccatgccgaacagcgcgctcgcctcatagcccttcacggtctcggcgatcgccggcacgtcgggcaattgcgaggagcgatccgtcgtcgtcacgccgagcgcgcgcagcgagccggagcggatgtgctggatgatcgagggcatgttgtcgaagatcacctgcacctggccgccgagcatgtcggtgatcgcgggcgccgcgccgcgatacggcacgtgctgcatcttgcagccggtcatcgacatgaacatctcgccggacagatgcaccgaggtgccgttgccggacgaggccatgttcaccttgccgggattggacttcacatattcgatgaactcggcgacgttcttcgccggcacgtccttgttcaccgtcatcacgttcggcacgcggttgaaggacgcaaccggcgcaacgtcgcgcacgaagttgaacttcagattggcgtacagcgaggcgttgatgtagttcgccggattgaccagcagcacggtgtaaccatccggctcggcgttgatcgcagcctcggtgccgatattgttgccggcgcccggcttgttctcgatcacgaactgctgcccgagcttttccgacagccgctgcccgatcaggcgcgcgatgatgtcggtggcgccgcccggcggatagcccacgatccagcgcaccggccgcgccggatagtcggctgcggatgcgcggccgatcgcgaatgtcgaaattcccgacccgatcaggcccagcgcagtgcggcgtgaaatcatgaagtctctcccgatccagcagggtttggccccctgcccgtttctgttgcgttgcgtgcggcgcggttctaacaaacaatgtcagatgcgaccagtgcgacacgtgcgacactgaccgcgacgaaagactaagctgcaaatgcgctggaccaaaaggatcgatcatgtccgtcaaggtgaatgggctcgaccatctcgtgatcaacgtcaccgatgtcgtgcgctcggttgcctggtacagcaggatcctcggcatggaggtgaaggtgttcgaccccggcaagggcaagacaccgcgcacctcgctggtgttcggcaaccagaagatcaatgtgcggccgtgcgatgccgacaaggtggattggttcaccgccgatcatgaagcggccggcagcgacgacctctgcttcctcacctcgagcacgcccgacgaggtggtggcgcatctgaaggccaatggcgtgaagatcgaggaaggcccggtggccaagcagggcgcacgcggcacgctgcgctcggtgtactgccgagatcccgacggcagcctgatcgagatttcgtcgtacgaggacggcacgacgtagtcgttttcgttgcgcgcgacggctcgcgcggatgcgcgaccgatgacaggcccacaaggcaatcaggccttccgcgccgcggaacagattgctccagcgctgcgcttccgatttgcgcttggcgcacgccgatggcagaactgctcccaaccaagatcaatggcggccggcaaggctgcgcgggaggacgtatggccagttcaagtgcagtcccgggtgtcgtaggtccgtttgcggggctcgacgtgccatggctgctcaggatgcgcgccgaggtgcgccgcgatcatccgttcctgatctgggctccgttcgacgcgccggcgcggcgctggaactacggcgaattccatgagcgcgtcggcgcgctggcggcgggcctcgccaaacgcggcatcaagcaaggcgactatgtcctgatccatctcgacaattgcgtcgaggcgatcatgtcgtggttcgcctgtgtcgagctcggcgcgatcgccgtcaccaccaacacccgctcggctgccgccgagatcgaatatttcgccggccattgcggcgcggtcgccgcgatcacccagccggcctatgccgaactgatatcagccaactgtaaggggcttcgctggatcgccgtgatctcgcacgatgccgggcaggcgccgtctcaggcgcccgcccgaggcgacagttttgacgcgctgttcgccgacagcgccgaccggccgaagcgcctgatcgatccgctggcaccgtgcagcgtgcagtacacctccgggaccacgtcgcgtccgaaggcggtgctgtggacgcatgccaacgcgctgtggggcgccaagatcaatgctgcgcaccaggatctgcatggcttcgacgtgcaccagacctatctgccgctgttccacaccaacgcgctggcctattcgatgctggcgagcctgtgggtcggcgcgacctgcgtgatccagccacgcttctcggcgagccggttctggccggtggcgctcgagcacggctcgacctggacctcgacgatcccgttctgcatgaaggcgctgctggagcacgaggtgccgaagcatcacaagttccggctctggggcaccgccgtgaacgagccgccgccattcgccgtattcggcatcaagatcatcggctggtggggcatgaccgagaccatcacccacggcatcatcggcgaggtcgaccagccgaacccgccgatgtcgatcggccgcgccgcgccggaatacgaaatccgcatcaccaatgatgacggcaccgcgaccggcgtcggcgagaccggcaatctcctgatcaagggcattcccggcctgtcactgttcgccgagtatctgcacaatgagaaggcgacgcgcgagagttttgacgagcatggctatttcatcacaggcgatcgcgtcacgatgctggagcgcggctacatcaagttcggcgaccgctccaaggatatgctgaaggtcggcggcgagaacgtcgcggcctccgagatcgagcaggtgatcgcagtggtaccgggcgtgcgcgaggccgccgtggtggcgaagaagcatccgatgctggacgaggtgccggttgtcttcatcatcccgcaaaccggcatcgccgccttgcctgccgacctgcacgacaaggtcatgaccgcctgccgcgcaggcctcgccgatttcaaggtgccgcgcgagatccgcttcgtcgacgagatgccccgctcgacgctggagaaggtcgcgaaggccgagctgcggaagatgctggaataagagcccgccccgtcattgcgaggagcgaagcgacgaagcaatccgtctctccgcgcatatgaacgtatggattgcttcgcttcgctcgcaatgacggtgagacgtcaattcacctcgaacctgatcggcagctttttcggaccgttgacaaaataggcctgcgtcatcttcacctcgccgtcgagcgacagcgacttcaggtgcggcagcagctcctcgaacaggatgcgcatctcgagcttggcgagatactggccgaggcatagatgcgcgccgtagccgaacgcgacgtggcggttgggcttgcggtcgctgcggaagcgatcgggctcctcgaacacctcctcgtcgcgattgcccgaggcgtagcacagcatcagccagtcgcccttggcgatcttgcggccgccgagctcggtatcggcggtggccgagcgcatgaaatgcttgaccggcgtcatccagcggatcgcctcgtcgaccaggcccgggatcaagtccggattggccttcaccttggcgaattccacgggatccctggccagcgcccagatcgcgcctgcggtcgaggatgaggtggtgtcgtggcccgcggtcgcaacgatcatgtaatagctggtctgatcgtgctccggcatatagtcgccgccgatcttcgcattcgcaatgacggtggcgagatcgtcccgcgggttctgccgacgatcctcggtgatcttgcggaaatacgcggagaagtcggcgatgatcgcctgcagcatcaccgagacctgctccgcgctcagcgcgtctcggacgcgcgccgtgtcgggatcctgcgggccgaacagctcctgcgtcagcttgagcatgcgcggctcgtccgcctcgggcacgccgaggatctccatgatgacgtgcagcggatagccgagcgcgacgtcgtcgacgaaatcgcaggcgccgccgcggtcgagcatgcgccgcacggttgcgcgcgcgatctcgcggacgcggccctcgaacttgccgagattattcggcatgaaccagccctgcgtcagcgcgcggtatttcggatggtccggcgcgtccatctgtaccagcgagcgcaccagattggggctgccggtgatcttgcggacgcgctcctcgagcgcccggttggtcagcgtggtcggccggtcggcattgtggaacaggtcgttctgccggctgatcgcctggatatgcgcgtgcttggtcaccacccagaacggatcgaacttctccggttgcgcgatcccgagcggattgttggcgcgcagccagcgatagctgtcgtggatgcgatcgtcggcataggcgacgggatcgacgagggttgccgcgatgtcggcggggatgttgatatccccggtcgttgccgtgtccatgttcgtcctcacctgtcccagcatcgggtcgtgccgatgatcgccgaaatctaggcagggttaaggacaaaggacttgcgttgattggctacaaaccccgccgcacacgcgattgcggggcgtgccggcgcaatgacggcggggaggaagtcctcaataatgcccgaacgccaccgggcggaacgcctgcagcaattgctggtcgagcttgccgcccatctcctccatcatggagaacgccttggcgtgggtgaattgcagccggtaggcccgcttctcgaccagggcggcatagacgtcgacgatcgtggtgacgcggacgatgtcgctgatctggttgccgctgagaccgtttggatagccggtgccgtcgaggaattcgtgatggtgcaggatcacgtcgagcatttccggcgggaagccgccctgcgccgacaacgcctcgtagccgcggcgcggatgctcgcgcatctcggccatttcctcgaccgtcagtgcgccgggcttgtcgagcagggcgaccggaacgaaggccttgccgacatcgtgcaacagcgccgcgcgcgcgagccgacgctggtcgtcgtcgcgcatgccgagatgctgcgaaaacgcgaccgcaaagccggtcacgaacaggcagtggcgataggtctcctggtgatgacagccgaccgtggtcagccattcgcgcagcgagttgtgcttgatcgccttgaggatcttgttttcggcggcaacgatgtcctcgaacttgagcggctcgccggcgcgcatccgctcgaacatcttcaccatcacggcatgcgcggcctcgacgccgcggttcagcgccttgccacggtcggtctcgtcatagccgctgtcgtcgggaaatgcagcgcggatgcgctgcaggaggccgcgcgcatcgaatggccgcgagatcgtgtcggtggcgccgagcgcccaggcctgcatcgaggcgtggtgcagcgcatccgccagcacgaacagccgcggcatctcgcgataggcgtcgccctgcagcttggtgcgcaccaactgcacggcttccggcgagcgcaggttgatgtcgacgacgatgccggagagatcgtgggccggccgctcgggaatatccgacgtcagaacggtgtcgacctcgcccaccgcgcgcaggatgctggcgagttcgttgctttgatcgcttcgatctgacgccagcaagaggcggcgcttcgaagtctggttattggctaaggcagtcatgacatccccgtcgcggtaacgaccgacgccggacgctagctgacgatgcgttccctccggcttaatggggatgctgaacggcggttaagcgcaatggctacaatttgagcgaccgcaacatctgccagcaaaatcaggctggctggaccgacgcgccgaggcggctcgcacagccaattatcggtttttgggtggcccaagacgacgttgatacccgcgtcggcgcgctcagtcgcagggtctgagatagccggcagtgatcgccatctccacaagttccttgatgccatcgcggagaccgctgatgccgacgtcgcgctcgctgcgctcgtgccagacgacgcccgcgtcgaagccgggcagatcgaacggaagcttgaactttgcaacgtcggcgcgacgctccaccagcccatcgggaacgatcccgagcagatcgctgttggcgacgaggccggccaccagcatgtggctcggcaccaccaggccgatgtcgcgcgtgaccccctgacggcgcaaggcgagatcgatccggttcggaaacagtccgtcggaggacaccacaacgtggcgttgcgccatgaagcgttcgcgcgacggccgcttgaggatcgaatgaccgggtctggcgatgccgacgaagtccgagcggctgagtttcagcgcgtgcagcttggcgggcagcggctcgagcggtgccaccatgagatcacaggtgccttcgaccaccatgcgcaccgcagcgtccgggcccggccacggcttggcgtggaccgacagatacggcgccctcgcctgaacccatcgccacagatccggcagcaatcctgccagcgcataatcgcccgatgtcaacgtgacggtctggcgaacctcggacagcggctgcggggtcagcccgaccacggcttcgaccccggccagcacgtcgttcaatggaccggccaggcgctcggcctttggcgacggcatgaagcgattgccatgccggatcaggatcggatcgtcgaacaacacgcgcaatcgctcgagcgcattgctgagcgccggctgcgagaggccgacacgtttggccgccttgctgacgtggcgttccgcgagcaacgcctgcaacaccaccagcagattgaggtcgattgaacgcaaattcatctgatcaatacccggatatacaaagtatccattagatggatgtgctgcgttgcgctaggagtttcacaactcacttgcccctcgccgccgacctgccggggcgcgatcgatccgaacaccggccacgatgtggctgcggcgctgcggattggccgcgccatcgcaggcgcgcgtccctcatggacctttgtgatgcatgcccccaagcgcgccggcctggcacgcaaccttgccaccctcctgaccggactctgcgtggcctcctgtgcgcacgacccatccgatcgcgtcacgggagagtgttcggtgacgttgatcggcaagtgctcgtctaagcaggtcaccagcgacctgtcggagagcgacaaggcggcgttggtatcgctgcaaaaccgcaaggtcggcatcaccatcaacgatgctttgaaggccgcggaagcctcgctgaaggcaaaccagttcgagcaggtgtcaatcgacagctccggcgcactggtgcagggcgagaagaatcacaagatcgccgaccgtggccaccagatgctgcaagcggtgatcaacgccaaattgccgatgctgaagggcaagcccgaccacgagacgacgcgcgcgctggtgaccgtgcatgcggtgtcgggcgtcactgccgtacacgccgaattcatcacgacgatctgggacagcaagggcgactcgaagacccgcgtggtgaccgatccgcaggtctataactcgttcttcgcgaagttcgccgacaattcaccccggtgatcacgaatgaaaaacgccggagagcggtgctctccggcgttttcatcggttcgatcgttcaggacgttacgccttcatcgccgccttgacggcctccgccgtgatcggcaggccgcggacgcgggcgccgaccgcgttgaagacggcgttgccgatcgccggcgccaccaccgtcaccgcgggctcgccgacgccggtggccttctcgccgttggcgatgacgctgaccgcgacttccggcagctggctcatccgaagcggcgtgtagctgtcgaagttggtctgctcgatgccgccgtccttcaacgtcgccttctcgaacagtgccagtgacatgccccacagcgccgcgccctcgacctgggcccggatgccatcgggattcacttgcgtaccgacatcggtcgcaaccgtcagcttcttcaccgtcacctcgcccgacggagcgaccgcgacatgggcgacgcaggcggtccagcttgcggtggcgcgctcctgcgacgacacgcaggccacgcccataccttcgccctttggcagcttcttggtgccgtaaccggcgagacccatcgccgcgagcaaggtattgcggagacgctgcgcgccgccgtcgttcttgcccttgccgtcgagcagctcgacacgaagcagggccgggtccttgccggtcgcatgcgcgatctcatcgaccatgctttcgaccgcccagaacgtccagcccggcgccaccgagcggagctgacccgacggggtggcgttgtgcgccatctcgttcttgatcgcccgcacatagtggttgggtacggtgtagaagaagtccgctccgttgacggtgaacgcgtcgagcggtcccttcttgtcgaccgaaggcgacaggaagtcggggattccccaacgctgggtcggccaggcggagacgacgtcgtggctcaatgcgacgagcttgccgtcgccgtccacgccggccttcaccttctggaaggtcaagggacgcgagaaatccatcgtcatgtcgttctcgcgcgagtagatgaccttgaccggcttgccgacggccttcgccgcctgcaccgcgggcaccatcatgtcggcgtcgagacgccggccgaagccgccacccagccacgtctggtgcatcaccacgaacttgggatcgatcccggccgcgccggccgcgatcgcaccggagcgcgtcgcgaactggttgccggaatagatgtgcaggatgtcgcccttgaactccgcggtggcgttcatcggctccatcggcgcgtggatgttgatgttggtggtgtattccgcctccagcaccttggccgccgtgccgaaggccgcatccggatcgccgtccttgacgaagaattggccggagtcgctcagcccctgcagccgcttggcttcggcgagcagcgcttcgctcgacgccttggcgttcggcccgccatcatagctgatcttgagcgcctcggccgccttcttcgcctgggcataggtgttggcgacggcgacgacccagccggtcgtggtcatggtcttgtcgtccagggtgacggccttgatgaagcccggcagcttcttggccgctgagtcgtccaccgacttcacggccgcgccgtagcgcaccggcggggtgaccagcgcgccgtagaccatgcccggcagcatcgtgtcgatgccgtacttggccgtgccgttgaccttcaggggaatgtcgagctgcggcaccgagacgccgatcatggtgtactggtccggcgtcttcagcttgatcgccttcagatcgtccgccgtgaacgtcttggtcgccttgccgctcttcaccacgtcggcaaacgacatcgacttcttcgacttcggatggctgatcgtcgacgcgcgcaccaccagttcgctggccggcacgcccatcgaggccgccgccgcttcggtcaatgcgatgcggccggcagcgccggcgcggctcatggcgtcgaagttcatcatcgtcgaccagctgccgccggtgatctgcgcgcccagcacgggatcgttgaacttcggatcgttggaggcgagctggacccgcatgtccttccagttcgcgccgagctcttcggccacgatctgcgccatggtcgaggcgacgtgctggcccatatccgccttgccgcaagtcacggtgacgagaccatcgggcgcgatcgagtaccagacgctcggttcgaaattggcgggtgcgggcgccgcgagcgcctgatcgatgccggagccggcatagccgagcacgaggccggttgcagcggtgccgaccaggaaggaacggcggctgaggtcggtcgtctcgggagcgaggtttttcacgtgcttgttcatgtggccctccgctcggatccggaggccgatgcggtgcgcatgtcggacgcagcgcgcatgatggccttctggatacgtgaataggtcatgcaacggcagagattgccgtccatatgcgcgaccacttcttccttggtcgggttggtgttcttcgacagcagcgccgccgcctgcatgatctggccggactggcagtagccgcattgcggcacctgctcggcgacccaggccttctgcaagggatgttcgcccttcgcggagagcccttcgatggtggtgatcttcttgccgacggcgtcggcgaccgaggtctggcatgaccgcaccgcttcaccgttgagatgaaccgtacaggcgccacagagaccggcgccgcaaccgaatttggtgcccgtcatctgcaattgctcgcggatgacccaaagcagcggcgtgtcattggccgcctcgacggacatgttccgtccgttgatattgagatttggcatctctctccccttccggtgtaggaagccgcttacggcggcaactcactgttgggtcatggctggcgcccaccgggtaagcgacagttgccgaaacaatgatccggttcccggctggaggcaatccaatttggaattgctcgaaaagaataaatctcggaaactgccggttgtgcgatgcggcaacggcatgaagcttttgaaatgccagtattgatgccgtatcgatcactcctaccaaggtcggtagcactgccggacccgacatcgacaacagaaggagcccgtcaatggccaagctcaaccgtagcggcgtcgatatctattacgagattcacggcagcggtccgcctttgatcctcacccatggctactcatcgacgtcggcgatgtggcagggccagatcgaggcgctgtcgaagcggcacaagctgatcctgtgggacatgcgcgggcacggccaatccgactaccccgacgatccggatgcctacagcgaagccctgacggtcggcgacatcgccgccctgctcgatgccgccggcgccgacacggctgttgtcggcggcctttcgctcggcggctacatgtcgctcgcctttcatcgcgctcaccctgcgcgggtgcgtgcgctgctgatcatcgacaccggcccgggattcaagaaggacgacgcccgcgaggcctggaacaagcgcgcccgcgacaccggcgatcgcttcgatcgcgaagggctcgaggtgctgaagtcgctcagcgccgagcgcgcgtcggtcacgcatcgcaacgcccgcggcctcgcgcttgccgcgcgcggcatgctggcgcagcgcgacgcgcgggtgatcgagtcattgcccgcgatcaaggtgccatcgctggttgtggtcggcgccgacgacaccccgttcctggcggcctccgactatatggcggcaaagatcccgggcgcgcagaaggcggtgatcccgaacgccggccatgcggtcaacatcgaccagccgaaagccttcatcgacgccgtgctgccgttcctcgacggtctcgcggcaaacgcgcctggaaaggccgcctcatgaagacgattgtcgtcgctctgctgctgacgctggccgcaacggacgcgaacgcccggaagccacggctgttcgccgacccggccacaccaaccttcaccgcgacgctgtcgaaccacacgccgctggcgttcggcatgggtgtcgccgacgcgcagcgcgcgctcggcacgcccctcacctatgtcagcgggcggcccggcaacgagatcttcctgaccttccgcgatatcggcggcagcgggctgttccagcatcatgaccgtctctatctgcaattccgcaagggccggctcgccggctggaagggcgactggggcgagaactggatgtggcgctagccctcgtcaacgatcttcatgcaacccccaaacgcgacacgacaaggatggaccatgggacaagacatcaaactgaaggcttcggacggctttgaactcggcgcctatcgcgctgagcccaccagtgcaccgaagggcgctgtcgtcgtgatccaggagatcttcggcgtcaaccaccacatccgctcggtctgcgaccggctggcgagggaaggctatgtcgcgattgcgccctcgatcttcgaccgcatcacgccgaacttccagagcggctactcgcccgatgaggtcgccgaggcgcgcaagttcgtcgccaatccggactttgccgcgatgctgcgcgacagccaggcggcgatcgacgcggtgaaaccggtcgggccggtcggcatcatcggcttctgcctcggcggcagcatcgcctatgcggccgccaccaagctgtctgggctctcggctgcgatcggctattacggcggcgccatcatccgcttcgccgacgacaagccggcggtgccgacacagctgcatttcggcgagaaggatgccggcattcccttgagcgatgtcgagaccatcaagtcgaagcggcccgaagtcgaggtcttcatctatcccggcgcgcagcacggcttccattgcgacgagcgcgccagctacgacagggcgagcgccgacatcgcctggccgcgcagcatggaattcttcgcgaagcatttgcagaaatagcgcggctctctccatcccgtcattcctggtgcgcaattgcgcacctggggatgcgccgcaaggcgcaggcccggaatccattccaccgcaagacgcgcggacaaatggattccgggctcgcgctccgcgcgccccggaatgacgaaagaagagagattgcctaaactagaaccaacgctcgccgacgaacaccgtatcgccggggctcatcggcgtgcccagcggcaccacgaagcggccggagccggacgcatcggtgtgggtcagcgtgacgctgtcgcgcctggcccgtggcgagaagccgccggcgatcgcgaccgcgctctcgacggtcatgttcggaacgtagggatattggccgggggcttggacctcgccgaggatgaagaacggccggtaggattcgatttcgaccgccaccgacggctcgcggatgaaaccgttgcgcagccgtgccgagatttctccggcgagcccggccggcgtgcggccgcgcgccggcaccgagccgatcagcggcatggtgatcgcaccggctgcatcgatcgcataggagttggtcaggccttcctggccgtagaccacgacgcggagcttgtcgcccgggccgagatgataggagttgtcgtaaccggcgggcccacccggtgcggcggcatagaccaccggggcggcatagccataaccaggggaagcgccggcaaaggcggaacgcagtgcgctgatggcaccaccgccgcctccgtcggcgaccggagcagatgcgtaggccgggccgtaggtgacggtatcgacaccttgcgggccgaccgcaacgggaccggacgtgctcatgcagccagacagcgcgagcgcagccacaacggcagtgatcggcaatcgtaacgcgcgtgcaactggcaccggacctatccctcaacggcgagacaagcccagtcttgcaccacttatggttaataaagggtttgcgcgacccggcgggagagccggaaatcccgcctccccgtcgatttagcgcaaggcaactgaacgcaaggcaaccgagcgcaaggccacgcgatcaggcggccgtggcgccgacgccgatcgggcacgacacgccggtgccgccaagcccgcaatagcccgccggattcttggcgaggtattgctgatggtagtcctcggcaaaatagaactcgcccgatggtgcgatctccgtggtgattgcaccgagccctttggcggcaagcgccttctgatacgtcgcctgcgacgcatcggcggctttgcgctgcgcgtcgctgaacgtgtagatcgcggagcgatactgcgtgccgatgtcgttgccctggcgcatgccctgcgtcgggttgtggttctcccagaacgtcttcagcagcttctcgtaggcgaccttcttcggatcgaacacgaccagcacgacttcggtgtggccggtgcgtcccgagcagacttcctcataggtcgggttcggcgtgtggccgccggcatagccaaccgcggtggtgtagatcccgtcgccgagttcccagaacttgcgttccgcgccccagaagcagccgagcccgaacaccgcctgctcgaggcccggcggataaggcggcgtcagtttgctgccattgacgaaatgggtggtcgcagtcgggatcggcgttgcgcggccgggcagcgcctcggcggcgcttggcaacgcggtggtcttgcgcatgaacaacatggatacctccaggcgggacatcggccgacgcgggctgcggcctgcgggccggctgtcacctatatatgtcgttacgcgaatgatggcagccccgttactgatggctgcggcgaagagatgctacaccccggggcgccgccagctcagtcgcgcgcgtaaccgatcagcggcttgcgtggccggaacaggatcatcagcaggatgccggcaatgccgagcaccgcgaacaccggctgctccagcagcaggcggatcacgccgttccagagccagggcgcaaagcgatctacccaggcatggaacgcctgctggctcgactggtggatatcgttccagaactggccgaattgggtgaaccgcaggctctggtcggcgacgtagcgggccccgtcatagaccatgaagatgaagctgccagcgagcagcaaaaggccgatcagacggaaaaagccgcggatcatgcgtcacccaaactccctgtcgcgccccacgcgtcgtcaggccttaccgggcgctccccggaaattcaacctcttcagcggcttatccggccctcccgaggccgatttcaggccctttttcggtccctaaagcgttgacggtgctgcctgcgccatctataagaccggccgatggcggcgggcgcaatcctgccgccgctgttctttggacagtgccgcatgcgggggcagcagttttgcgctcttcgcatggccgcctcaaggacacccaagtcgataccttggacaaatacatcagagtcgagatttgaaccggccggtgcgcgcaagcccgaccactgagcgatcaccgccgaaggacagttagagaaccatggccaacaccacctccgccaagaaggcgacccgcaagattgcccgccgcaccatcgtcaacaagtcgcgccgcacgcagatgcgtggcgcggtgcgcaccgtcgaggaagcgatcaagagcggcgaccgcgaggcggcactcaaggcgatgcgcaaggccgagcccgaactgatgaaggcagcgcagcgcaacatcattcacaagaacctcgccagccggaaggtgtcgcgcctcacgcagagcatcgccaagctcgccaagtagagttcgcgaagctcgccgcgcgagctgactgaaaaacacatttgtcacgaagcccggctcgcgccgggctttttgtttttgtcgcgcctcctttcgtggaagtttttatagcccgataaaagttcgcattgccgcaaccgcatgtcatgcttcgtcgcgtccgtagttctaccggcagatatgcttaacgcgtcgcgctcgcgcagagattgttctgcgctaagccagatagatggaatagcgcgcggatatctcgcgtcgaaaaaacgaggcggggttaccctgcaaaagcaatcgtgaaaaatcacgcttcgcgaattacttatgcacatagtgccggacagcgattggaaaaatgaccggcgcgagaccaaatgtaaattttctatgaaaaatttttggtattgcaccatcgtttgtgacacgcgtgattctacgcggtgattcaaaaacttgctttcacacctccgcatcggcaacgccgcaacagttgcgaagagtcgcgatccccgtcgaatccacggattgtcaggaaatgcgcttggtgtatttatttcttgttcgcgacgcccacggctctccagatcagcgcggtttgagacccaagggcggacgcacaaatcggcggcggtgtgtgcgttagcgacgctttccaagcgaagctggattgacggctcatagcgatatgaggatggtcgacctgtgtcaaaatttctccggcgatgtccccggcaatttgggggatcgaacaagagagaccagggcgcccgtcggaatccggcagcgggaacgcggcgcaagcgaacgggttgacgacgacacgcggcggcgaagcgccgggcatttcggtgttcggtagcggcagttcgaatttgaagacaccagcaagctgacagcttgccgcgatacgtcgcggcgggagggggaggacttatgccttacggtatcatcactgcagtcgaactaacgacagccgaagtgcagatctccagtggtgccgtaatcaactcctcggacgttggctcttacccgcagagaccgtcgagtacgcgctgacctcgcggggcgcctcttctccaaacagctgatctgtcgcgtggcgcatggccgccacacgggagagctttgtccggagcagaccgcgcccgctagaggtcgcgtcgtgtcagggaacctgcacggcgctttcgccatcatcatctctcagatttggaaaagtacgaaggcaatgacgaacacggaacaggatcgctggtcgcgggtgaagggacgtttgcggacgagcgttggcgaggacgtttacacgagctggtttgcacggatggatctggagagcgtgcacgacgagagcgtgcacctgtcggttccgacccggttcctcaagagctggatccaggcgcattacgccgaccgtgtgctcacctgctggcaggccgagatgcccgaagtgcaccgcatcgacctcaccgtgcgctcagcgatccgtgcgatggcgccggcaaaggaagcggttgcgccggtcgagatgcgtcgtgtcgagcgcaccgatggccgccccgcgcccgaactgcgctcggttgcgaccgcgccggtgtcggccagccatgacgcgctgggcggctcgccgctcgatccgcgcctgacctttgcaagcttcgtcgtcggccgttccaacacgctggcccatgcggctgcgcgccaggtcgcagagggacgccgcggcgaccccgtgatgttcaacccgctctacatccatgccggcgtcggcctcggcaagacgcacctgctgcaggcggtgacctgggccggcaattccggcggcgagcgcaaggtgctttatctgaccgccgagaagttcatgtatggcttcgtcgcggcgctgaagacgcagacggcgctggcgttcaaggaagcgctgcgcggcatcgacgtgctcgtgatcgacgacctgcagttcctgcagggcaagtcgacgcaggccgagttctgccacacgctgaatgcgctgatcgatgccggccgccaggtcgtgatcgcggccgaccgtccgccgtcggacctcgaaagccttgacgatcgcgtgcgctcccggctcgccggcggtttggttgtcgagatgggttcgctcggcgaggaactgcggctcggcatcctcaagtcgcgcgtcgccgcggcccgcgcccaccacgcaagcttcgacgtgccggaggaggtgctcgactatctggcgcgcaccatcacccataacggccgcgacctcgaaggcgcgatcaaccgcctcctggcgcattccaagctcaacaaccagccggtgacgctggagatggccgagcgcgaggtgcgcgacctggtccgcccgcaggagccgaagcggatcaagatcgaggacatccagcgcgtggtcgcccggcagtacaatgtcagccgctccgacctcttgtcgtcgcgccgcaccgccaatgtggtgcgcccgcgccaggttgcgatgtatctggcgaagaccctgaccctgcgctcgctgccggagatcggccgcaggttcggcggccgcgaccacaccacggtgctgcacgcagtgcgcaagattgaggcactggtcgccaaggacacggcgctgtcggaggaagtcgagtcgctgaagcgtcagctccaggaataaggcgccgcgtcgttctagcgcgttccatggccctcccctttaccataggggagggctaaacttttttccggcccaaaacgtggggaacggggcccgtttcctgcccgtctcccttgcaccggccggccatccgcgccaccttgcggtccccccgtgggtttgatcaaatccggtattgatccgacttttcgggtttccgacgccgcggtgctgccctgaacggccgcccggcttttccatctgagggatctggcgggtattgcaatgaaggtcaccgtcgagcgcgcgcaactcctgaaatcgctgggtcacgttcatcgcgtggtcgagcgccgcaacaccatcccgatcctcggcaacgtgttgatccgcgccgagggcgccaaattgtcgctgaaggcgaccgacctcgacctcgaggtgaccgagaccctggcggccgaaaccggaaccgccggctcgaccaccgtacccgcgcacatgttctacgacatcgtccgcaagctgcccgacggctcgcagatcgtgctggaggctgacggcgaccgctcggtgctcgcggtgcgcgccggccgctcgcgcttcacgctgcagaccctgccggagagcgatttccccggccttgccgccggcgacatgacgcattcgttctcgctgccggcgtccgacttcaagcgcctgatcgaccgcacccagttcgcgatctcgaccgaagagacccgttactacctgaacggcatctatctgcacgccgcgggcagcgccaaggccgcaaccctgcgcggcgtcgcgaccgatggccaccgcctggcccagatcgaccttccgctacccagcggcgcagccggcatgcccggcgtgatcgtgccgcgcaagacggtcggtgaggtgcagcggctgatcgagggcgacgacgccgagatctcgatcgagctgtcggacggcaagatccgcttcaccctcggcaatgtggtgctgacctcgaagctgatcgacggcaccttcccggactacggccgcgtcattccgcagaacaacgacaaggaactggtggtcgacaagaaggatttcgaggccgccgtcgaccgcgtctcgaccatttccagcgaacgcggccgcgcggtgaagctcgcgctgtccgcgggcaagctggtgctctcggttaccaatccggattccggcagcgccaccgaggagcttgaggtcgagtacgcctccgatgcgctcgatatcggcttcaactcgcgctatctgctcgacatcgccgcccagatcgagggcgaggtcgcggtgctgaagctcgccgaccctggctcgccgaccctggtgcaggacaaggacagcaagggcgcgctctacgtgctgatgccgatgcgggtgtaagcacttctcttcgcgcgcatcggcactagattgcgtcgtggctgggcacgactgcccggcaatgacgagctgagatgaccccgtcccgcattcatcgcctgtcgctgacgcatttccggaactaccggacggcgacgctgcaagtcgcaggcgacatggtggtgctggtcggaccgaacggcgccggcaagaccaattgcatggaggcggtctcgttcctgtcgccgggccgcggcctgcgccgcgcgacgctggaggacatcgccgacaatcagggcgacggctcctgggcggtctccgcggaggtcgagggcgcgcttgggctcgcgacgctcggcaccggcatcgatccaccgaccggcgaggcgagcaacacgcgacgctgccgcatcgatcgcgagccggtgggttccgcgaccgcgttcggcgaccatctgcgcatggtgtggctgacgccggcgatggacggcctgttcatgggcgcggcgtccgagcggcgacgcttcttcgaccgcctcgtgctggcgatcgattccgaccattccagccgtgtctcggcgctggagcgctcgctgcgctcgcggaatcggctgctcgaggtgcgcaactatgacgaccattggtgcgacgcgatcgagcgcgagaccgcggagctcgcggtcgcggtcgccgcatcgcgcggccagaccgcggccagactcgcgatgatgctgcgcgagcgcggcgcggcgtcggccttcccctccgccgagatcatgctcgatggctggatggagaatgcgctgctgcaggaacccgcaacggccgtggaagaccgctaccgcgagaccctgcgcaccagccggccgcgcgacgccgccgccggacgcacgctcgacggcccgcatctgaccgatctgcaggtggtctacgcgccgaagaacatgccggcgcgcgacgcctcgaccggcgagcagaaggcgcttctgatcgggctggtgctggcgcatgccacgatggtcgcggagatgaccggcatcgtgccgctgctgctgctcgacgaggtggtcgcccatctcgatcccggcaggcgccgggcgctgttcgacgagctcgccaggctcggcgcgcaagtctggatgaccggcgcagatcccgcagccttcgtcgatatcggcccgacgggggagattttcgacgtcgaatccggccgcgccacacggcgcggctgaggtcgtggagcaggctccgaagaggcttcgaatccgccttcgaatcgggcttttcaagactgccggaatcggccctcggagaccttgaaacaggccgaaaaaatcccatctattcaatagtttgcagacggagactttgcgctaggcgcaacacctctttcatggcacaaatagcggaatcagcgcctcatcatgcgcagctgattcgggacatcctcgaaggcctcacatgactgaacctgcgcggcagacccctgccgaatccgagcatcccattccggccgaatatggcgcggaatcgatccgggtgctgaagggcctcgacgccgtccgcaagcggcccggcatgtatatcggcgacaccgacgacgggtccggcctgcaccacatggtctatgaggtcgtcgacaacgcgatcgacgaggcgctggcgggccatgcgagccgcgtgctggtcaccctcaacgccgacaattccgtcaccgtgttcgacgacggccgcggcatcccggtcgacatccacaagggcgaaggcgtctcggcggccgaggtcatcatgacccagctccatgccggcggaaagttcgaccagaattcctacaaggtctccggcggcctgcacggcgtcggcgtctccgtcgtcaacgcgctgtccagcaagctcggcttgcggatctggcgcgacgacaaggagcactacatcgaattcgcgcacggcgatgccgtggcgccgctcaaggtggtcggcgatgcgccgggcaaacgcggcaccgaggtcaccttcctcgcctcgaccgagaccttcaagaacgtcgaatatgatttcgcgacgctcgagcaccggctgcgcgagctcgccttcctcaattccggcgtccacatcgtgctgtcagacatgcgccacgcggtcgagaagcgcgaggagatgcactattccggcggtgtcgaggaattcgtcaaatatctcgaccgcaacaagaaggcgatcgtgccggcgccgatcatggtgcgatcggaagccaacggcatcggcgtcgaggccgcgctgtggtggaacgacagctaccacgagaacgtgctgtgcttcaccaacaacatcccgcagcgcgacggcggcacccatctggccggcttccgcggcgcgctgacgcgccaggtcaacggctacgccgaggccaatgcgaagaaggaaaagatcgcgctgaccggtgacgactgccgcgaaggcctcaccgcggtgctgtcggtgaaggtgcccgatccgaaattctcgtcgcagaccaaggacaagctggtctcctcggaggttcgacccgtggtcgagaacgtcctcaacgaggcgctcgccgcctggtttgaggagaatccgaaggaagccaaggagatcgtcggcaaggtgatccaggccgccgcagcccgcgaggctgcgcgcaaggcgcgcgagctgacccgcaagaacccgctcagcgtctcctcgctgcccggcaagctcgccgactgccaggaaaaggatccggccaagtccgaactgttcatcgtcgagggtgactcggcaggcggcagcgccaagcagggccgcaaccgcgaattccaggcggtgctgccgctgcgcggcaagatcctcaatgtcgagcgcgtgcgccccgacaagatgctgtcgtcggagcagatcggcaccctgatcaccgcgctcggcaccggcatcagcgacgatttctcggtcgacaagctgcgctaccacaagatcatcgtgatgaccgacgccgacgtcgacggcgcccatatccgcacgcttctgctgaccttcttctatcgtcagatgcgctcgatcatcgatggcggctatctctatatcgcccagccgccgctctataaggtctcgcgcggcaagtccgagcagtatctgaaggacgagcgcgcgctcgaggactatctgatctcgaccgggctcgatgaatgcgtgttcaagccggcctccggagacgaccgctcgggccgcgatctgctgtcgctggtcgaggacgcccggatcatccgctcggtgctgcgcaacctgcacagccgttacaatcgcgcggtgatcgagcaggcggcgatcgcgggcgtgctcagccccaggatcaccagcgagatcgcgaccgccaacgcggcggcggaatacatcgccaagcggctcgacgcggtggccgacgaggtcgagcgcggctgggtcggcaccttcacggaaggccacggcttccagttcgagcgcaccgtgcgcggcgtcaaggaagtggccgtgatcgacgacgcgttcctcggctcggccgacgcacgcaagctcgatgaatacgcgaccaagctgcaagagatctacgtgcgcgcgggcaagctgcggcgcaaggatgccgagcagatgatccatggtccggtcgacctgttcgaggccgtgaccgacgccgcccgcaagggcatctcgctgcagcgctacaaaggtctcggcgagatgaacccggagcagttgtgggagaccacgctggacaccgaggcccgctcgctgctgcaggtgaaggtcaaggaggtcgacgaggccgacgatatcttcaccaagctgatgggcgacgtggtcgaaccgcgccgcgacttcatccaggaaaactcgctcagcgccaccatcgatatctgagggctcgttcgctctcaggccgccgcgctctccgacacgatggctcggcgggaatgacgtctccgtgacaacgcgatcggcaccctcgcacagctacctttcgggtggatgctgagccgggaattgtgttacggtgccgaacagcctttgattccattgcggaatttcacacgggcaagcttgaatccaagtctggatgatgcgttaggggacattccgcgtggcgccgattcaatacatcgtcgaaggcggccgccgcctttcgggcaccatcgagccatcgggcaacaagaactccgcgctgccgatcatcgcagcggccctgctgacggagcatccggtcacgctgaccaacgtgccgcgcattcgcgacaccgagacgctggtcgagctgtgccgttcggtcggcgccagcgccgaatggaccgagcgcaacacgctgcagatccatgccaaggagatccgcgccgccgacctcgacccggcgctgtgcgcgcggatccgcgcctcgatcctgctcgcgggcccgctgctcgcccgctgcggcgaggtcgcgctgccgccacccggcggggacgtgatcggtcgccgccggctcgacacgcacttcctggccttcgagcagctcggcgccacggtcaccgcgacgcaccggctcgaattccgcgcctcgaagctgaagggcgccgacgtgttcctcgacgaacccagcgtcaccgcgacggagaatgcgctggtcgccgccgtcgccgcccgcggcatcacccatctgcgcaacgcggcctccgagccgcatgtgcaggacctcgcgaatttcctgatcgcgctcggtgccaagattgaaggcgtcggcaccaacaccatcatcgtgcacggccaggcgacgctcgggagtacgactttcgcaatccagcccgaccatatcgaggtcggatcgctgatcgggctcgccgcggtgacgcgttcgccgctgcgcatcgcacgcgccggcgtcgagcatctgcgctcgatccggatgggctttgagcggctcggcatcgtctgcggcgtcgagggcgacgatctcgtcgtgccgtcgaaccagaccatgaagatccacgacgatttcggcggccacgtgccgaagctcgaggaccagccctggccggccttccccgccgacctgatgtcgatcgcgatcgtcaccgcgacgcagtgcgacggcgtcatcctgatgcacgagaagatgttcgagtcccggatgttcttcgtcgacaacctgatcgcgatgggcggccgcatcgtgttgtgcgacccgcaccgtgcgatcgtcgccggtccaagccggctgcgcggcgcaccgatgaattcgcccgacatccgcgccggcatggcgatgctgctggccgcggtgtgcgccaacggcacctcaaccatcaacaacgccgaccagatcgagcgcggctatgagcggatcgacgaacggctcaacgcactcggcgccaagatcaagcggattcccgcgcgatcgtgatccgggcatgatccggaaaagtgtgaggcggtcttccggtcggatcatgctcaaacagcaacctgggacgcgacgatctctgcgtaagatcgtcgcgtttgggcagcttggccatccctccggccggtttgccgtgctagacgtgcggtcatgacctgcatcgacaagatcgacccggccgcgtcgcgcgcggccgtcgtcccctctcgcaagctgctcacggccgagctcgcggaaacgctgaagctcgcggtgccgcttgcgctgacgcagctcggccagatcgcgatgatgacgaccgacctcgccttcatcggccgactcggcagcgagagcatcgccgcagcggcgctggcgcataccgtgtatttcgtcagcttcaccatcggcatgggcatgatgtccgcggtctcgccgctggccgcgcaggcgttcggcgcacgcgatccgcgcgtgatgcggcgcgcgctccgcgtcggcctgtgggccggcttcttcatggtgctgccgctgatggcgctgccgttccagggcgaacgcatcctgctcgcgctcggccagacccaggctaccgcgcatctggcccagcaatatctgttcgggctcggctggggcattttgccggcgctgtggttcatcgcgatccgcggcttcatgagcgcggtgaaccggccggagccggtgctgtggatcacgctggcggcgatcccggccaacgcgttgatggtctatcttctgctctatggcaaatggggcatgcccgaactcggcatgttcggcgccgggctggcgaccacgatcgtcaatctcggcaccttccttgccggcgtgtggttcgcggcgcggcgccgcccgttccgcaagtatcatgtgttcagccgcgtctggcgcatcgactggcccttgatgggcaagctcgtcgcgatcggcgcgccgatttcgatcgccttcctgctggaatacggcctgttcggcgcggccggcctcttgatggggctgatcagcaccacggcactcgcggcacaccagatcgccctgcagatcgcggcgatcctgttcatggtgccgttcggcgtcagtatggcggccaccgtgcgagtaggccaggcggtcggccgccgcgacaccgaggcggtgcagcgcgccggctttgtcgcggtcgcgctctccggcgtcttcatgagtgtgatgacgctggcggtgatcctggcacgcttcgagatcgcggcgctgttcctcggcgaggcctccgacgccaccgcacggctcactgcgatgctgctgctgatcggcgcgacgttcttcatcgccgacggcgtccagaccaccagcgccggcgcgctgcgcggcatgcacgacacccaggtgccgctgctgttcgccgtcatcagctactggctgatcggcttcgcgtcggcatccgcgctcgccttctgggccgggctccaggcccccggcgtctggatcggattgtcgctcggcactgccgtttatgcgaccctgctgatcttgcgtttccgcctgctggcacgcagactgggcagatgaaggttgacgaggtcacgccgaacgtggattccgacgcgctgctaaccggcgcgcaattcatcgacgcgttccggatcgcgaccacgcaaccggatctcgatgcgcggcacgccaccgagacgatgttgggccagcagccgcgctgggccagatggttgattgccttgcgaaacgttctggtcacgccgctcggcctgaagacctcgggcgccggcgacggcgtggggcgcgacatgatcgggctattccccgtactcagcgagacgcccgagcggctggtcgccggcttcaacgacaagcatctcgacttccgcctggtggtcgacgtcaccagcaccggcgccgcgcgcaacatcaccgccaccacgctggtgctgacccacaactggctcggtcgcacctatctcgcagtgatcatgccgttccaccgcctgatcgtgccggcgatgctgcgcaaggccgggggctagcgcatgaccctgcgggtcgacctgttcttctcgttccgcagtccctacagctacctcgcgctgccgaagacgttgaacatggtcgccgacttcgatgtcgcggttactttgcggccagtctatccgctcgcggtgcgcgtgcccggcttcttcaagaagaccaatccgcaattcgcccgctatgtcgtgctcgattccagccgcgtcgccaaacatgagaacataccgttccgctttccgcgtccggacccgatcgtccaggacatgacgacgctcgacgtcgccgaacaccagccctacatccaccgcctgacccggctcggcgccgccgcccaacttgagggacggtcgctggccttcaccgccgcgatcagccgcgtgctgtgggacggctcggtgcagggctggaacgagggcgatcatctggcgcaggcggcggctgccgccggcttcgatctcgccgcgatggatgtcgccgtcgcggccgatcccgatcactatgaagcggtcatcaagggcaacgaggacgcgcatgccgcgtccggccattggggcgtgccaaccttcgtgttcgagaacgaaccgttcttcggtcaggatcgcatcgacctgctgatctggcgcatggagagcaagggcctgacgcgccgcaaggcatagacggaggtcacgccacgctcttctcggatgtttcggccacgatcttctcggaagcctcttcgttcgtgcaccaatttccgtgacagcgcttgaggtcgttcaggttctgccgcatctggtcgagtgagaagccaagcgcgaagaaccgctccatggcatcgaccgggaggccccgcgtcaggccttcgctgcgcaccgcggcgacctccgcgctataggcctgcagcgccgcatcgaccggcgccatatcggccgggccgctgccggcacgcagcgccgtcgcgaccgacatcatataggtgacgatcgccttgctgacgtcggcgagcggccgcgccagcctggtctggatttccgccggcagcggcacgaccgaggcccgcccgatcatgacgacgtcatgccgcagccgctggatggtccgcagcaacggacccgtatccggccccgacgacaggtgcatcgagcgctcgcgctcggcttccatgcccgtggcgtgcaggttggtcaccgccgtgccgatgccgtcctggatccggtgcagcgcatcgttgtcgagaccgcgggtcaggccggcgagcaattcggcgaacgccgccgagagcagttccagcagcttcgacgcattgaccctgatctggctgaccgcgcgcgacggcagcacaaggaacgagatcacgaggccggtgagcgcgccgaccgtgacttcgaggactcggtcgatcgcggagtccagcgggttggagtgatgcatcgtcggcagcagcagtacgatcaccgccgtcaccgtcgccgagttcaggctcggattgagcgcggcgatgaaggccagcggcacgatcgccagcaccagcagcgccagcaaactgccctcgccggaatgcgggatcaagaccgcgatcgcgccgccatagatggcgccgccgatggtgccgagcatgtagtcgcgggtcgccttcagggagcggccgacgctcatttgcgtcacgatcagcgaggtcagcaccgcccagagcggcagcatgaggtgcagcgccagcgcgatggcataggccgccacgccggcggacgcgatccggaccgccagcgccagttgcgtcttgcggctccagagctggtcgaacatgcgttttgcgaaggtcctcatgcaccgtgatccggaatcaatggaatggcctgtgttaaaggacgtcgaacatggctgctgcccgcggcggcaaggtggcttgaaaggccaaacccgcccgcctaccctgcgccgcaaagattgaggaaacacgatggctcacgaaaccgcaacgctcgccgcctatgtcgccgacctgaaattttccgacatcccgccggaggtgctggagcgcgccaaggtcctgacgctggatttcctcggcagcaccatccgcgcccgtcgcgatgcggaatcgacgccctcgctgatgaagatgctggaagcgctggcgctcgacggcaagggcgaggccaccgtgttcggcgacagcaagacctggacgccggcggtggcggcgctgctcaacggcgcgctcggacattcgctcgatttcgacgacacccatgccgattcctcgctgcatccgagcgccccggtggtgcccgccgcgttcgcggtcggcgagatggtcggcgcctccggccgcgacgtgctgaccgcgatcgtcgccggctatgaagtgtgctgccggctcggcaacgcgctcgacccgacctcgcattacgcgcgcggcttccacccgaccgcgactgccggcacctatggcgccgccgcggccgcagccaagctgttcggtctgtcgaaggaacagatcatctccgcgttcggcgtctccggcagccaggccgcgggctcgctgcaattcctggtcaacggcgcctggaacaagcgctaccaggtcggcgccgccgcaatgaacggcgtgattgcggcgacccttgcgcgcaacgacttcatcggttcgagcgactcggtcgagggcaagcatggacttctggtcggctataccaatgacccgcatccggacaaggcggtggccggcctcggcaccacctacgagacattgaagatcggcgtgaagccctatccgagctgccgctatactcacgctgcgatcgacgcgctgatcgcgatgcgtcgcgagcacaatctgaccccggaccagatcaggaaggtcgagatcggcctgcaccgcaacggcatcaccctgaccggcgacgccgccaccaagcgccacccgacctcggtggtcggcggccagttctcgatgttcttcaccggcgcgatcgcgctcgaccagggccatttcggctgggacgattacgaccggctcggcgacaaggcgatcgacgcgctcgccgacaagttcgacgtggtgcaggacgaccgcctcgaagtcggccgtacccatccgttcggcgcccgcgtctcgatcacgaccgatgacggcacccatgagcgcctctacgccgacccctccggcgagccgacctcgttccccaacgcgcaggcgatgcagcagaagtttttgaccttggcccgcccggtgctcgacaagcgcgccgaccagctcgccgacgcgatcatgaccctggagcggttcgaccgcgtggagcaggcgacgcagctgggacggcaataggcgggacgacacttcctccttgtcattccggggcgtgcgaagcacgaacccgggaatgacaaggatgagattcggattgtcctggcatcacggaaggcaggatgttgtacgcctgcggctgacgcctcccgctcaatttcctctcgcaagcttcgcctggtgtgacgtcgccgtcaccacatcgcggaccagatcgaacaccccgtccgcttcgagcggcatgttcggcgagcggccgagccggacgatcacgagccgctgcgacggcacgacaatgacatactgcccgatcgtgcccttggcgaggaacgcatcgcgcggccagccgtggtcgacgcgatagcgggcgccgtagctgtcgccgagattggtccagaagccggcgccatagccgacccaggcgtgcggcgtcggcgatgccgcatatttcacccagccttcgggcaggatgcgcttgccgccagccacgccgtcatcgagatagagctggccgaacctcgcccagtcgcgcgcactcgccagcatttcgcccgatcctttcggcgtgcccgccgcatcgaactccagcaccacgttgcgcatgccgagcggatcgaacaattcgcgatgcgcgaaccgcatcacgtcggcggcatggccgcccgtcgcgttgcggatcagctgtgcgaggatgacgtaattgccgtcgtgataattccacgccgcgcccggtggtgtctcgagcggaatgctctcggcatagctggccatatccgattccacgtatttcatccggttgaccggctcgagcgcggacatcagcgaagcctgcagcgagctgccgagcgcaagccccgcggtgtggcgcagcagttgatcgaccgtgatcgcgtgtctcggatcatgcggatcctgccaggccgcgatcgggacgggccgatcgaccgtcaatttgccgtcgcgcaccaggattccgatcagggccgagatcaccgatttggtcgcggagaagccgagcagcggcgtctcggtgccgatgccgtcggcgtaacgctcggcgacgatgcggccgtccttcatcaccacgaccgcgcgggtgtggcggaacggcggctcggccggttcggcgaaggcgcgatcgagcgcggcggcgagctgcgggctctgcggcgcgacgatgccggggccggcgatttcgggcagcaacgcggcctgcggctgcaccggcggcagcgcgacgtcggccagcgccgcgtcatggtcgagcgtgcagccgagcccctcgcgatagaccgcatggctgcggccgagcccgaacagcgtcaccgagacgtccttgcgctggcggtcgacctggtaatccatcgcccaggtgatcaggcccacccccggcatcgcctcggtggtctcggccaaatcacgccttggatcgaggccactgacgaaggtttcggagcagagggtgttggcgagaaatccggttgccactttgggtacgtcgcgggcgcggacggcggaccagcccagcgcgccgagggcggtgctggcagcgaggatgagagtgagcttgcgacgggtcacgggggtcctccggcatgtgagaatgtgtggcgggaggaagtgggaacgggcgcggaaaggctcgccggatttgcaaatcgggctagccgggaattggaggcagctcgccgattctggaattgtctagtgattacagcggcattctcgcgctacgccccttcgtgaggtgagcaggaaggttgggctgcctccccccttgtgggggagggttggggagaggggccccgggcgcgacggtcgatgggagcagcgtcggtgcaggatcgcccgtacgtcatcgcaaggcagtttaagagaccacccgtatggtacccctctccctaaccctcccccgcaaggggggagggaacccttccgccggtgtgtccctcacgacggaatagagcgatcacgccgccgtcgccttcagcttccggtactccgtcggcgtcacgcctgtcgtcgccttgaaggcgcggttgaagggtccgagggactggaagccggcgtccatcgcgatggtgatgacggggacttcggcctgggcgggatcggcgagggccgccttggcctcctcgatgcggtggttgttgaggaagacgttgaaattgcgatagccgagccgctggttgatcagccgccgcaatcggtattcgggaatcttcagccgggtcgccagcgtaccgatggtgacgttgtcctggcgatagatccgctcgtccgccatcaggcgcatcagggcactgaccagcttctggtcggctatctcctcgatcgcggccggcggcgcattggcgacgaccggctcgaccggcgcggcgaacagatcggcgccatcgacacgcatcattgcccaggtgatacccgcgacgatggccgcgagcacacccgcgttgagcagattggcccactccacggtcacgcggctgccggcatacgcaatctgcagcagcgcgttcattccgccatacagcgcagaggccacgacgatgaagacacggacgcggcggcggcgctcgaccagatccgccgaccacgatccgatggtctgcgtcacggcaagcacgatgaagacgaccgtcagcagattgaccgtggtgatcgccgcttgcgcgtggccgctcggcgcgatccacatgcaattgacgaagctgaacgcgaccaccgcggcccagatcagaccgtgccaccagcgcaggacgaaggcgtcatcgaacagcgcgcgggtgaacagccagaacaccacgatgtcgccggtcgaaatcgcgatcagcggcgcgtgccagatcgagatgggctccccggcgccgatcgacgcggtcaccgcatgcgcagccgtgccgagcgcgaaggcgatcacgagccgccccgccagcacgttgcggaaatccgcgaacatcgagaccgcaagcaccagcagcagcgtcaccgcggcggcgcgcaggcagagttcggttgcggccaatgtcatcggtcgaaaggatctccgggtcagccgaacaatcgtcgctcaggcggcgtttttcaagccggatcgcggcgccagcgcaggcgcgtcgtgacccagatatcgacgacatcgccctcgagcttgcccggcccctcattgtcagcgccgagccgccgcgccactgcctgggacgcgaaattggccggatcgatgcagtggatgatgcggtcgagcgtgaaattgtcgaacacaaagtcgatcgcggcgcgcgccgcctccaccgcatagccccggccgcgaaactccctcgcgatgccccagccgacctcgaagcccggccattcaggcggacaatacggcccgacgcggccgatgtaacggccggaggatttctcttcgaccgcgaacatgccgaagccatgcagcgcccaatggcccgagatcacggcggcgttgcgccagcccttcagctccgacgtgacaggctgatgatccggcgtgatgaagcgcgccgtctcggtatcggacagcatccgggtgttgtcagcaatatcggatgcacgccatggccgcaggatgagacgcgcggtctcgatcacgggaccatcgacacgcagtagtcttgcgcccggcttgatcagagaaaccatcatcgcctccggtttccaagaatacgctgttatcacgcgcacagagtcgccaaaagtacttcgtcgtccctgcgaaagcagggacccataaccaccgatttcagttgttgctcggggctggggccgcagctttcgtagcataagcatttgtggttatgggtcccggctcgcgcttcgcttggccgggacgacgaacggagtatgatcggaatgaagcacaaaggagttttgcgatgagctggcagccctcgaccgatcccgaactcggcgatccccaaacctgcgacgcgctggatctgatcatcgtgccgcgcacccgcgatctcggcgacggctttgcggtgcgccgcgcgctgccgcacggcaagcggcagatggtcgggccgttcatcttcttcgaccatttcggcccggtgcagtatctcgccggcaagggcatggacgtgcggccgcatccgcatatcgggctcgccaccgtcacctatctgttcgacggcagcatcatgcatcgcgacagcgagggcaacatccaggagatccagcccggcgccatgaacctgatgaccgcgggccgcggcatcgcgcattccgagcgtacccccgacgtgcagcgccgcgacggccagaagatgctaggcttgcagagctggattgcgctgccggccggaaaggaagagatcgcgccgtcgttccagcattacggcgcgggcgacctaccgatgatctccgagcgcgacttcaccgcgcgcatcatcgccggctcggccttcggcatcagctcgccggtcagcatggtctcgccctggttctataccgaagtgaccgcgcaggcgggcaacagcgtgccgctcgaccccgaccatgaggagcgcgcgatctacatcgtcgacggcgaggtcgagatcgccggcgatcgccatgaggggccgcggctgctgatcttccggcccggcgaccgcatcaccgtgaagacgctgcggccaacccgcatgatgttcctcggcggcgacgcgctggaaggaccgcgccacatctggtggaatttcgtctcgtcctcgaaggagcggatcgaacaggccaaacaggactggaaaaccggccgtttcgcccaggttccgcaggaacacgagttcattccactgccggagtgagctatttcctgtgatatcccttgatatccttggcagcccgcacgccgcgtgcgggcgccttgctttcgaaagatcacgcccatgaccgcgatgctgacaagcgatttgcccctgccccggatcggccgtggcaaggtgcgcgacatctacgccgtcggcgacgatcgcgtgctgctgctcaccaccgaccgcatctcggcgttcgacgtggtgatggcggaaaccattccgatgaagggcgcggtgctgacccagatcagcgcctggtggttccggcagctcgaaggtaccgtgccgcatcacatgatcagcgccgatgccgacgagatcatccgcgcggtgcccgagctgaagaaccatcgcgccgacatcctcgggcgcgcgatgctgtgcaagcgcaccacggtgttcccgatcgaatgcgtgatccgcggctacatctccggctcggcgtggaaggaatacgcgaccgcgggtaccctcgccggcgagaagctgccggctggcctggtcgaaagccagaagctcgagccggcgatcttcagcccggcgaccaaggccgaggccggccatgacgagaacatcacggttgcgcgggtacgcgagatcgtgggcgccgacgtcgccgcgacgctggagaagatggcgcgcgatgtctatggctacggcgagcagaccagccgcgcccgcggcatcatcatcgcggatacgaaattcgaattcggccgcgacaaagacggccgcatcatcctgatcgacgaggtgatgacgccggactcctcgcgattctgggccgtcgatgcctacaaggtaggccagccgcagccgagcttcgacaagcagccgctgcgcgactacctcgacgtcgagcgccgcgccggccgctggaacggcgacgccccggcgccgccgctgccggaaagcgtggtcgatgcgacgagcaagcggtatttggaagcgtatcgccgcgtcactgggaccgagctgaagatttagcgcggctccccccatcaccgtcaccctgacagcttgtgaagctttcgggttttgccttttacgtctgtaggtcgggtgggtttgg

SEQ ID NO: 20 - DNA, 139176 bp, Bradyrhizobium enterica
cgccacggcgtcgcgagcctgcgtgagcgccgcgcgcagcccggcgaggcggtcggggtcctgcagcgcgggcagcccggtgcggcggagcagcgcgcgcagcggcggattgccgagcgccgtccggtagaactttccgagatggggatcgccgccgcgataggcctgcaatacggggtcgcaaacgtcgtaaagcgacgggccgtccttcctgacggccagcgaccggcacacggctccggcgatctcgtgaaggctcatgaatccctttcccgcggaaccggttaacgccggcgtccccgacggtgtttcctccggttctcccccaaactcgcaagcctttggaaagctacatgaatccatacagaacacaaatgtgacggagatcacgtaacgggattttaacggcgtcaatggcctgtgccgggcggcagggtgcggcaaaccgggttgccccggccgcccgtccgggttaagggagtgtttgttgcggcgccgcaaattgagctcaattcaacggcacagacacctcaaccccattacacctgatcgtcactgacgcgactaactggcgcgatttcgctcgaacgccatcgggataaagattgggactaggaacgctatgaaccttaggcagcttcaactttcccggcgcagcatcgccgtctgtgtggcggtggccggcacggtgtcgctggcgatcggcgcccatgccgcgctcaacaagcgcatgttcgagtcgcccaagggcgccgtcgccgccggcaccaccggcagcatcccgtccggtgcctcccgcctcgcactgatcatcggcaacggccattacccggacgcatcggcgccgctggcccagccgatcaacgatgcccgcaccttgtcgtccgcgctgcgccacgagggctttgacgtcgacgtggtcgaggatgccaccaaggacgacatgttccgcgcggtcgagcgcatgaaagccaagatccgccccgacaccgtcgtgatgctgttcttcggcggctatggtgtgcaggtcggccgcgagagctacatgatcccggtcgatgccacgatctggaaggaagccgacgtcaggcgcaccggcgtcagcgtcgagtccgtgctcgatgcgatgaaggagcgcggcgccaaagcaaaactcgtggtgctcgatgcgtcgcgccgcaatccctatgaacgccgcttccgcgccttctcgcacggcctcgcgccgatcagcccgccggagaacaccatcgtgctgacctcggcgacgccgggcaaggtcgccgacgacggcaagggcgccaacagcgtgctggtctcggagctgatcaacaacctcaacgcccaggccggcgcagagaccgccttcaacaagacccgcgtcgcgatctcgcgcgcgagcgaaggcgagcaggtgccgagcgtgtcgtcctcgctcctggaagacatcaagctcggcggctgaggtcgggctctttccccacgtcgtcccggcgaaagccgggacccataaccacagggctgcgttgttgaagcgcgctgaggccacagcgcttcaagacaattcacattggtggttatgggtcccgggtcgcgcttcgcttgcccgggacgacaccgtttatccggtgcccactcacttcgcgtcggcgctggcgcccaccggccgcaccggatcgccctcgcgcagcagcgcgccggcgcgggcgacgacgatgtcgccttcctggatgccgtcgcggatctcgacctggccggccgacatcaacccggtctcgacccgccgcgtctcgacgcggccgccgcgcaccacctgcaccacggtgccggcggtggaatagaggatcgcggtcagcggcacggcgacgccgcagctctgcccggtcttgatctgggcgcggccggacgaattcaccagcagccgctggttcgagccgatcgccaccaacacctggccgagctggctgttcggctcgatggtcggcgcgatcaaccgcaccttgccatccatctcgccggcgcctgatatcttcagccgcgcggtctgctcggtcttcagcttggcgatgtcgcgggtcggcaccatgccgaccaggtcgtattcgctcttggcgatgatcgagaacagcgcgtccttgcccgaggccggcgcgccgacgatcgccgttgagcccgagatcgtgcccgccaccggcgccgtgaggttgatcgcgttcgtgccgtcggtcagccgcgccagcacctggcccgcggtgacggtgtcgccgggatcggccttcacctccgcaaccttcaagccgaagcgatccggccgcacctgctgctcgtcgcgcggcagcacgatacccgagacctcgacaatattgccgaagcagtatttcgaggccttcagcaccgtcaccgccgcgcccttcggcaacgtgtcggcttcgcccgcggcggatgcgggagcggccgctagcagaagcagcgcggaggcggccaccaccgaagcgcgcagtccgtaggatgggtagagcgatgtgtccgtcgtagctcgaagagcgaagacggaagcgaaacccatccactgcttgaggcacgaaatcatcggcaaactattcccaaaatgagggcctcctgaataccagatgcggcgctggcgaaccagccggctgcgccgcatcggccttctcctgcgccctcttctgtgtgagatgggtcaaatcagaatcggggccgcatattcgctgtcgtcctggcgcaggccaggacccattgccccgaatggtggttgcggcgcgtggctggggccacgatccctctcggcacgaatagcggtgattatgggtcccggctttcgccaggacgacgtggggagagagtgccgcttactccgccgccgccgccacgcgcggcagtccgtcagcgcacgatgcgcttgacgcgtcgtgtgggcgttggcttggcggctgtcggtgtttcgatctgcgccgcggcatcggcatcggcatcgcgggcttcgcgcagcgcgcgcaggcgctccatgttccggcgcacggcgattgcctcgcgctcgacatcggccatggcgcgggcgccctcttcggccgcaagccgctggcgttcggcgcgcgcccggctttcgggggtgggagcaggcgacgttcgggtggccatggtcatccttgcttcaaatacgccaaggcccgcccaacctgtgcagatcgagcgggcctggcagtcactccagtacatccgtggaatgacgctgcggcatgattgctgcgacaagcgcggagcgctgatgcgaacatcatgcgcgaatgcgaactcaggccagctgaagattctcggcgctggtcttgccacgcatcttgtcggtcttcagctcgaacgacaccttctggccttcggcgaggcccgacagaccggcgcgctcgacggcgctgatgtgaacgaacacatccttgctgccgtcatccggctgaatgaaaccaaagcccttctggccgttgaaccacttcacagtacctgttgccatgtctcttctccaaagcagacgtttcgcgtgatggacgcgtcaccaattcaactggcgatgtctttggaggaaggccgatgggaccattcaacaaggcgcaacggctaatcgaacggcggtaatatatacccgtttggcgcgaaaacaaggcgggcacgggagcggttccgtgacgcgcctcactccgccgccgcttccgctgacggctcgcctttccagctgaggatctccgccgccaggatcgggtggttgaagcccttcaccacgaggtcgtcgatggcgcggccttcgacgaaagcctcgaccatgccgtagacgcggcggctcaccacgatctggcccgccttggcttcgccgcacaggcgggaggcgaggttggtgacgctgccgatcgcggcatattccagccgctgctcgaagccgacctggccgagcgtggcatagccgagcgcgatgccgatgccgaaccccagactatgcccgcggttgcgccatttctcggtcagcgggccgacggtgtcgcgcatctccaccgccatccgcacggcgcgcgcggtgtggtcggcgagctggatcggcgcgttgaacaggatcatcacgccgtcaccggcatatttgtcgagcgtgccctcatatttgaagatcagctggccgagcgccgcgtgatattcgcgcagcacgttcatggcctcttccggctcggtcgcctcggtgaaggccgtaaagccgcgcagatcgcagaacaccaccgtgacttcgcggcggtggctctcgagcaggccctcgggattgtccgacgaggcgatcagctgcgccacctgcggcgccaggaaacgctcgagcttgcggatgcgctcgatctcgccgagctgggtctcgacccgggcctccagcgacttgttccagtcggtgagctgctcggtctgctgcttgagcttgtcggcctgctcgcgcacagtggaattggctgcttccagcgcgtggctcttctggtcgacctcggtgaacagccgcgcgttgcgcatcgccagcaccgcctggtgcgcgaaggtcttcatcaggccgatcaggcccgcggggaaatcgccggccgccttgcgcagcaccaccagcgcgccgagcacgccctgctgatcgaccagcggcaccacaagcaccgagtggaagccggcgccgaccacgacatcgcgcagcgggtgctcgggctgggattcttgttttgacgcgttttcttcacgcgaaccggtatccacttcgctcgaaaacgctctggtagcgagatccgggaacgctagcggctcgcccttcgcggcggcctcgccgagcggactgttatcagcgtcgatcgcgcgatgatggccttcggcctcgctgtcgatgccgatcgattgcgtcagagtgaatgcgcgttgcgcggcgtcatagccatagatcagcacggcgtcggcatgggtgatctcgagcgcgcgggcggcgaccgtcggcagcacggcgttgaggtcgagcgaggaggccaccgctcggccaacctcctccagcaccttcagctcgttgatcgattgcgcgaggtcgcgggtgcgctcctgcaccttggcctcgaggccggagtaggtctcggccagctgcccggccatgctgttgaattgctcggcgagctcctccagctcatccgcggtcttcactttgatgcggtggccgaagtcgccggcgccgagacgccgcgcgccggtacgcaatgccgtgatcggcaccagcatgcgccgcgccagaatcgtgccggcgatgatcgcgaccacgaggccgagcgcgatcaggagcgcgatgcgcaccagctggtcgcggatcggtgacagcgcctgcgacgtcggctgctcatagaacacgtgccagccgaggttcggcgccgatgtcgctgtcgtcagcaccgcattgccgtcgacgtccttgccggaggcgatcggccggccgtccgcggacagcactgcggcgacctgcggcagcgcggcgaggtccttgccgacctcggggcccttcgacgaactcgccagcacgcggcccttggcgtcgacgacataagcataggccgtgcggccgacctgggaatcgccgaaatagtcgttgaggaaacgcaggtcgatctcggcgacggtgacgccggcattgaagccggaatgttgctcaccgatcgacatatacggccgttcgtcgcggaaatacgccggcgcgtaggcggtgccgcgctggaccgcctcggtgaagcgcaggtcgcgggagaggtcggtgttggagttcaccgtgacggtctggcgcgacagccgcagcacctcgcggccctggccgttgatcagcgtgagctggctcaccgccggcacctggccgagcagctgggcatagtcggcgcggcgcagctcgagcgtgttggaggaggcgcgggtcacccaggagatctggcgttcgagatcggagatcgactgttcgatgtgcttggcggtggcgtccgccttctcgctcatcgcgtccgtcagcgtgctcttgatgccgcggtagctgatccaggtctcgagcgcgccgttgaccgccagcacgaacacgacgaggccgaccagcgcgagcacgtatttggcgaacaggccgccgcgcaggaaccagttcttgcccttgtccgtagccccgttcatccagcctcgtccgtcccctccaatccatcgggtgcgccgctgtatcctgcgctgtttagcacggatcggcagggcggggcggctcgtcgggccccatggttagccgtggataggaggttttgagttggaaggggagccgtcagcggaagcgcagtaggcggcatactccatccacgtcgtcctggcgaaagccaggacccataaccaccgtcatccatgatgagcgggatcgcggcccctgcgcggcgccatagccaccattcggggtaatgggtcctggcgttcgccaggacgacagcgagtatgcgggaatatcagcgattgaacagctgccgcagcacgtcgttcatcgccgggttgtcgcgccgctcggcggtgtcggccggcggaggattgggcggcggtggcgcggcggcctgtggtgcgtccggggtgggctgggcgaggctgcggctcgggcgtgcggcgttgccttgattgagggtggagaggccttgctgcagcaggttcccgatggtgtcgccgagctgcccgccgagcggattgccctggccggcgccgcccggagcctggccggtgccgggctgcgcgccgtttccaccggcctgcgcgccgttcaggaggttggtgagcccgttgaggccctggctgatcccctgctggctcagcgcctggccattcgcgccgaacagtcccttgcccatctccttgagcttggcataggcggcctggggattgtcgaggatgccctgcatctccggatagatccgcgggctgacccagggcccctcgaccatcacggggatgccgaggccgaccggattgccggcgcggccctggccctcggtggtcatcaccagctgcggctcgacccggaacccgagctggcgggtgttgaggtcgacggtgccgaccccgctcatcttcaccagcggcccgatcaaattgaggtcggtggtcaccgcctgacccttgtcgagcttgaacgaggccgagagctggctgagatcggtcgaaagcgcctcaccctgctgccagcccgacaatgtgccggtggtgaggttgcggatcatctgcgcgacgttgaggccgaggatcttgccgtcctggaaaacgacgaaggcggtgccgccgagattgccgacgatggcgcgctcgctcgtgccctgcgaggtcagcgcgaccttggcctgcatcctgccgtcgagcttgtcgaactcggcgaggctcttcagcaccggcagcgcccgcacgccggcgaggtcgagccgcagcgtgtaggtcggagttgtgctcctcgcgtcgatcgtgacgtcgccgttggcggtgccctcataggcgccgagattggcgagcttggccttcagcacgccgctgtcgaccgacgcctcgatcgcagcctgcgcgaagcggccgtcgccgatcacgagctctgccgccgagatgcgcgcttgcgcgtcgacataattgagcccagcgagatcgatcgacgcgttgctccagctgttggtgcccggcggctgcgttgcgccgggctgatccggcggcatcgcaatcgagatgcgctggaaatcgagatcgagcttcaccagcggcttgttgctggcgaaatcgaccgaggcccagccggtgaagccgccatcgccgagcgtgccggacacgccgttgaacatcaacaccgtgccgttcagccgcgcttccgcgttcgccttgatcgccgcgggcaacaggccgggcgcatcgatggtgaattcggccggcacgttctggcgttccagcggcgcttgcggcgcggtcgcgcggatctcgaatttcagctggctgtcgcccgtgcgcgcgtcaccggtgacgacgatcttgcggtcagcgccgatcgagatgtccgccttgagtgcctcgatccggttctcgacccggtcgcgcacattggagaacacgatggtgccgccggtgatgccgacatgccggatcgtgatgttgccaccattggacgcggacgacttcgccggcggattgtggtcacgggtgcgctcgcgctgcaacggcagattgaccaccggcttctctatcacgaggtcggtgatctcgggccggcccgaccacaggctcgacagcgtcatttcagctgcgacgcggcttgctgcgaaccggtcgtcggcctcgcgctcccgcgggccctgcaacacgacatcgctgagggtcagattgaccgccggccagaggctaatcctgacgccgccattgatgctgagctggtagccggtctcacgctcgacccgctccgtgatggcggacgtcacgaaggacgacggaatcccgaccgcggcgaccagggcgacgatcgcgatcacggcgacgatggcggccccggcgaatttcagtgctttcatgtcgtcgttccaggccgcgcaagcagggttccgccgcggcgagacacggccgatcgcgcgagattaccccgcaaaccggacctcgctgcaatggtcggaaaaataatccgttaccagcatgaacttatgtgacctctcacacactcttatgagggtgatttttgctaaccgggcgtcaggggaccgctcggatggatttggaaggcaatacaatgagcaaacaggccgaatttgcggtcattctgaagatgaacccgatgttcgccgatctcggtgcggacgagttgcagcggcttgcgggcctctgccacacccggcagctcgccaccggcgaggtgctgttccagaaaggcgatcccggcgatgccctgttcggggtccgccgcggccagataaggatcgaaaccggcgcctccgatggcgcccggctcacactgaacttcatgggatccggcgatctgttcggcgaagtcgccgtcctcgacggccaggatcgcaccgcggatgccaccgcgggcgagcccactgaattgttcgtgttgcggcgggaggatttcctcggcttcctcgagcgcgagccgaaggtcgcggtcaggctgatcgcgttgctgtgccagcgcatccgctggcagagcgagcggatggaggaatcggtgctgcagccgttgccggtccgtctcgcacgccggctctgcgcgctggccgaggatttcggttccgaggtgcacatctcgcaggaacaactcggcatcttcgtcggcgctgcgcgcgagagcgtcaaccggcagctgcagacctggcgcaaggacggcatcgtcgacctgcaacgcggccggatcatgctgcacaacatgaccaagctgacggcggtcgcgcgcaacgattagaaacgttttcgagcgaagcgagcaatggcttcgcgcaacgaacgcgacgaacgggaagccaggcggatcgcatgcaacgcgtgcgcgaggatttgattctctcgcgcgctctgcctgcgaatgttgtcgcagtcctgcctaaaagacgtgcttgcatgatttggccgctatcgctttcattgcggtgccggtccttggggtgacacccagccttgctggcctcacgccatccacctgcaaacccctgcggtctctttcccgttgaccgcaggggttttgcgtttcgcgaccacgtgacgcgaattcgccgacctcaatgccattcaaggatgggccgtgcagatatcggccggcgccgcactcggcatcgcggcggaggcgccgatggatgcgcgctttggcggtctggactatgctgttccagcattctacctcggtgcgaggaatgggaacgggagattcgccatggatcagcagggcgcgggtggcaagccgccggtcaagtcgcaggaggatcttcgcgggcatttcgggcaggtgagcccgctcgcggagaagaaggtcctccaccatctcgacaagttctgccgcgacttcatcgcgctgtcgccgttcctcgtcatcgcctccagcgacggcaacggccatgccgatgccagtccgcgcggcgatgcgcccggcttcgtctccgtgatcgacaacaagacgctgctgatcccggaccggcgcggcaacaaccgggtcgatacgttcggcaacatcatcgcctcgcccggggtcgggctgatcttcatggtgccgggcatcaacgagacgctgcgcatcaacgggcgggcggagatttcgcaggagccggatctgctgaccccgctgacggtgcagaacgtcacgccggtcatcggcctcaaggtgcatgtcgatgaagtctacttccactgcggcaaggcgctgatgcgctcgaagctgtggagccccgctgcgcaggtcgaacgcaacagcttcccgacactcggccggatcatcgccgagcagaccgccgcgatcgaggtcgaggtcgccgagaaggcgatggaagaggcttatcgcacgcggctctactgacccgaccgctagggtgacgtgatttgcttcaggagtgccgtatcgccgaactcgacgagttcggcgatcttgccgttctcgatcctgaagagatcgacgacctccgtcgtgaccgtgatgtccttcggaatgaagcggaccgtgatggtcgagtgcacggcgacgcggtcaccatcgatgaggaagctcgtgaccttgcgatccacgaactggaacgccgtgatgaaatccgacagcgcctgccggacattcgcgtgcccctcgacggcgccggtcagatgaagagcctctttgtcaccaaccagttcgaaactggcgccggggccaaatgctttcatcagctcatcgatgtcgcccttgttgcgcgcggcatatgcctcagtgatcaagcgatggattgcttcgcggtctgtcatcgggagccctcctctccggcctgaaaggcagctactctaccacaccgggagtgcagctggctcgcaacttcgggagtgcggacctgatttactccgccgcgggtgagatcacgctcggcgggccgccctgccgcttgctctcgtcggcgttcggctcgctcggggtcagctcgtggtcggcatgcgagaccacgagccgcttgccgaagcgccagatcaggcctccgatgtcgtccatcaccatgaacatcgccggcacgaacaccagcgacagcacggtcgagaagatcaggccgccgatcaccgcgagcgccatcggcgagcggaactcgccgccggcgccgaacgccagcgctgacggcatcatgccggcggccatcgcgatcgtggtcatcacgatcggccgggcgcgcttcatgccggcgtcgatcatggcctcctcgcgcgccttgccgtcgcggatcgcctccaccgcgaactccaccagcatgatggcgttcttggtgacgatgcccatcagcatcaggatgccgatccacaccggcgtggtgagctgcttgccggtcaggagcagcgccccgatcgcgccgccgatcgaaagcggcagcgagaacaggatggtgatcggctgcaggaaggtgccgaacagcagcaccagcacggcatagaccatcatcaggccggcggtgatcgcggtggcgaagccgtcggacagttcggcgaggctctcggcgtcgccggacgggctgaccttgacgcccttcggcaggctcttcatgaccggcaggtcgtagatcagcctggtggcatcgccgagcgcggcattgccgacgaggtcggccgcgacggtggcctgccgctcgcgatcgtagcggttgatgctggttgggccctggtcgagctggatgtcggcgacgacggagagcggcacgccgccgcgctcgccgcgcaggccgagcggcacgcgcagctgctccagcatctgcagatcgctgcgcgcattgtcctcgagctggacgcggatcggcacctggcggtcgccggcgtcgaatttcgcgagcgccgggccgacgtcgccgatggtcgcgacgcggatggtctgcgacaggctctcggtcgagacgccgagccgcgccgccagctcggcgcgcggacggatgcgcagctctggccgatcgagcgcggtctccgagatcacgttagcgatgatcggaatccgcttcatctgcgtcgccagttcgctcgcgacgttgttgacgatgttgctgtcggtacccgtgaccacaagcgaaatcgcgcgcaggccgttctcgtcgaggaaccagaaccggatgtcggggacgttatcgagctccttgctgatcgacagctcgagctcgcgctgggtgatcttgcggtccgccttcggcgtgtagttgatgatcagcgcggcgcggcgcacctcctggatgcccggcggcacgcggccgccgtcgacgaacacgctccgcacctcgggccgcttgcgcagccgcgccacgatctcctcggtgaccttctcggtataggcgagctgcgagccgggcggcagctccatggccagcagcgagcgcgcggtgtcctgcgcgggcaggaagccttggggcagcagcgtgatgctccagatcgacgcggcgaacaccgcaaagccgatcagcacggtgacgtaatggtgcttcaccgaccaggcgacgaggctgtgatagctgcgcaggatacggcccggcggtgggtcgtcgtggtcatgatgcttgaggaaataggccgccagcatcggcgtcacgaagcgtgctgcgagcagcgagaagaacacctgcaccgacacggtgatgccgaactgcttgaagaactggccggcaatgccggacatgaagcttgcgggtgcaaagatcgcgatgatggtgagcgagatcgcgatcactgcaaggccgatctcgtcggcggcttcgagcgcggcacgataaggcgtcttgcccatccgcatgtggcggacgatgttctcgatctcgacgatggcgtcgtcgaccaggatgccggtcgacagcgtgatcgcgagaaaggacaccaggttgagcgagaagccgagcaggtccatcacccagaacgccgggaagatcgacagcggcagcgagaccgcggcgatgatcgtggcgcggatgtcgcgcaggaacagcagcacgatgatcacggcgaggattgcgccctcgaacaaggtggagatcgcggctaagtagttgcccttggtgaactcgaccgaggtgtcgatcagcttgaggtcgacgtcgggataagcgcccttcagcgcgtcgatccgcttctgcaccgcggccgcgaccaccacgtcgctggcgcccttggagcgcttgatgccgagcgccaccacaggctcgccgttgaagcgagcgaaggtgcggcggtcggcgatggtgtcggtgacggtgccgagatcgtcgagccggatctcgccgccgccgaacagcgggatcatggtgcccgcgagctcgttcagcgtcttggcgccggccagcgtgcggatcgcctggtcgttcttgccgatctcggcgcggccgccggcgacgtcgacattggtgccgcgcaggatctggctgacattgacggcggtgagcccgactgcctgcagcttgtcgggatcgagcgagaccaggatctcgcgctcgacaccgccgatgcgctcgacctgagcgacgccgcgcacaccctgcaacgcgcgcttgaccacgtcgtccacgaagtaagagagctgctccggcgtcttgccaggcgagatcgccgcataggtcacgatcggcaggccgatcacatcgacacgctggatcagaggctcggtgacgttctgcggcaggttggcgcgcacgcgggtgaccgcatccttgacgtcgttgagtgcgcggtcggtattggtctccagcgcgaactggatggtggtcaccgacaggccgtcggtgatcgaggaggagatgtggcgcacgccctcgacgccggagacgccgtcctcgatcgtcttggtgacctgcgactcaagttccgagggggcggcgccgaattgcgagaccgcgaccgagatcaccggaatgtcggcgctgggcagtcgcgtcacggctagcttggtgaaggagacccagcccagcaccagcaggatgatcgagaagacgatcgagggaagcgggttccggatcgaccatgccgagatgttcaaagccattgatgtgtccgattaccgtgatcgcgtgcgatcgagttcttcggcgaacatggtcttgatctggtcgccgtcatgcagcgaggtgccagcatcggccacgacgatttcgccgacgtcgaggccatcaaggatttcggtcgaggtgtcggaggtcagtccgacgcgcaccctgcgggtctcgatcgtgttgcccttcaccacctgcaaggtcagacggtcgatcgccgtgcgcggcaccgcgacgccgcaggagcgcttggcgtcgatattggcgcgcgcgaacatgccgaccttcagcgtcggattgttgttgatggtgatgcggacgtggccgagctgggtggcgcggtcgatctgcggcgagatctggcgaaccttgccgacgatgtcgggtgcgtcgtcgcggctgatccggacattggcgcccggattgagcttcaggagctggaagcccggcacctcggcgtcgagctcgatctcgttgttgaccgagatcttgaacatcgggggagcctgcggcgaggccggtgcgccgggcgcggtgcgcacctcggtgacgaggccggccgccggcgcgcgcagcacgagcggcttggcattgccctgagccgcctgctgcggcggcggggtcaatcgcgccagttcctggttctcggtcacggtgtcgccctcgcggaccagcacgtcggtgaccttggagccgtcctggtcgacattcacctgtgcctcgcggcgcggcacgatgaagccggtgacgcggaccatgtcggagaagcaggcattggtcgatttcgtcaccacgaccagcgcctggccgggcgtctccttctcctccggatgggagcggtgctcgaatgcgtagtaggcgatggccagcgccaggaaaaacacggtgccgagcgcaggcttgaggtattgggaaaagttcatcgcctgatcaatccggaacttggcgcgtcatgacagtgattgtcttgggcgctcgtctgagggatgcttcggagcttggcccagaagtattggcccaaaagcaaatgcgccccgccggggtgcggaacgcattgtaacctcaaaaaggagccgcgccaccgcccatcacatccggatcatttggatgcggtgtccttgttttcgacgttgacgacctgcacgcgccggttgacgtccgccatcgggtggctcgggtccttgagcttgctcttgccatagccgacggtgaccaggtcggtgccgctgatgccgtatttgtcgacgagatagcgcttgatggcgtcggcgcggcgctccgagaggccctgattgtattcctcgccgccggccgcgtcggtgtgacctgcgaccacgaaggtcgagcccttcagatcctgattggtcagggcgcggccgagcgcctgtaccgagggcagcgacttcgcgctgatgtcggcggagttgtagtcgaagttgatctcgagatcgatcttcggcttgtcctggacgatggtcgcgatttcctcgcgttcggtcgaggacagcgagcgggtggcgcggccgcgaacgctctgcacgaacttggcctggtcggcgttcagcccgggcgaggtctgcgggccgaccgagaggccgcgggtcagcggcttcttctcgggcgtcagcgccttgatgatctggtcctcggtgacgttgtcaccggcgcgggcgaccgccatgtcgaatgacagcatggcgccgacggtcacgactgaaaggattgcggccttcgccgacggcttgaacatctcggtccctcctgcgcaggctggcgcggttccatgcaacgtgtcagatcgattttgccggcatcgctgcccggcacgtaccctctgattagtcgcgcgatttcatccgtggttcgagccgcgggccggccttgcctgatctgtcattgcacgccgtagtcggcgaattccttgacgatgttcgggtccatcgccttggcgttggcgatgtcgagatcgccctccgccaccgcgccgttgcgcttcttggcgaggccgcgcccgtacagcgacgaggtcagccgcgggttgatcttcagcgcggcgtcgaaatcggcgatggcgttcttgttctgcccgcccttcaggttcatcaggccccggctgtcgagcgcatcgacgaagttcgggcgcagccgcagcgcctcgttgcagtccttcagcgccgcctgcaggtccccgatcacggtgcggacccagcagcggttgttgtaggcttcgacatccttcgggttcagccgcagcgaatcggtgaagtccttcaccgcgaggtcgtaggcacccttgctggcatagacctggccgcggcgatacagcgcagccgcgtcgtccgggttcttgcccagccggtcgctcaggctcttgatcgtcggatcatcggcaagcgcaggcggattgcctggagccggcgtgggctggatcactacgggcggaggcggtgcgggtggcggcagtgcgatctccggcgcttttggcggagacggcggtgcggtcgccactgacggcttcggcggtgcaggcggtggtgtcggcgcggttgccgcaggaggcgccggtgccggcgtcggcgttgccgcgggcggggctggtggaggcggagccggcggtgccgttgcgacctcagttgacggagttgcggcgggggcgggcgcagcgctcagggctcccggtgcgccgcccggaatgaatgaaaaatcttcagccaaggacgacgaaatccatggcacctgctcctgccgcgaggcgcgggtcacgccgacccgggtgcggttcagcgtttcctccgccatcaggtccggggtgcggatctccttcagcagttcccgcacgaacaggctgcggtcgctgccattgtccgagacgacggacgacagcgcggccgaatacatcaccagcgtgccgttgggtgcgatgacaggggcgagtcccgccgagaagctgcggaagcggcgctcgaacgggttgcgcctggaggcgtcgatcagcgcgatcttgaccccggcgccgcggctgttgatctcgccgagcacggtctcgaggctgaagccgtcgcggcggacgtcggcctcggcccagatctgggcgtcgatcgggatcatgtagctctgccggttcgactggatgccgtaacccgagaagaagatcagcgcgaccgagcccggcttgatcttgccatagagccggtcgaaggcgcggtgcatgccgtcgccggtcaggttctcgccgacctcgacggtgaagccatcgcgcttgagctcgtcggcgacgtcgcgggcgtcattgaccggctccttcagcggcgcgtcggcgtccggatacttggcgttgccgatcaccagcgcgaaacggtcgccggcggcgatggacagggtgggcgacgcgattgaaaaaatcagcgtggcgagcaaggcaaggcggattttcataatcgcggcaaatccagatcgcggcattccgatggaaatggcgccgctttcggcctgcgccccgggaaccttactctagcgaaaatccattatcaaaccacggccgaactcccgtcaacggcttgtcgcagcatcgcttattgccgtgacggccgcgagaccgcagtgcaacagcatccggtcatggcggccatcgccatcgcggcatggtgccggttcctatgaaccgatagtgtgattgcactcacagtggctccagccccctgtcatgcgctcgtcgcactgcgcgcggtttgacctttgcgcagggcgatggctttgtgctcgggacggcaagccattcaaaacacaaccgcaaacaagagcgaaaccgatgggaaacgcctacgaaatctacgccctgcgctatgcgacgatgtcgccgcgcacgccgcacctcaatttcctggtccccgatccgcacgacaccacggcgcaggatctcgactatttcgtctggctggtccgtggccacggccgcgatatcctggtcgacaccggcttcaacgccgaggaggccaaggcgcgcgcccgcaagctgacgctcaacccggtcgatgcgctggccaatttcggtgtcagcgccgacgcgatccgtgacgtcatcgtcacccatctgcattacgaccacgccggcaatctggatcgcttcccgaacgccaaattccatctgcaggaacgcgagatgagctacgcgaccggccgctgcatgtgcaacggcatgctgcgccatccgttctcgatcgaacacgtcacccagatggtgcgccatgtctatggcgagcgtgtcacctttcattccggcgacggcgagatcgcgcctggcgtcaccgtgcatcgcgtcggcggccattccgacggcttgcaggtggtgcgggtcgagaccgcgcgcggccctgtcgttctggcgtcggacgccgcgcattactacgcgaacttgcacaagaagagcccgttcccgatcgtctacaatgtcggcgacatggcgcagggctgggagaccgtcgagcggctcgccggccatcccgaccgcttcatccccggccacgatccgatcgtcagcgagatctatccgcgcgccagcgacaaggtcgatgcgttcgcgctgcatctggcgccgtcgcgatcattcgcgaaatagcctcgccgatcgggcgaggcgcatctccaccactcaagaaacgtcaaaaagaagcagcgatatgactgacaccaagactctcggattcatcggcctcggcgtgatgggtgagccgatttgccgcaacctggtcaagaagagcgggaagcgcgtcgtcgtattcgacctttcggccgagccgttgcaacggctccgcgccgatggcgccgaggtcgccggctccgtcgccgacgtcatcaagcagagcgatgtgctgttcctctgcctgccgagcgccaagcatgtgcgcgcggtgttcgagggtgacggcattctgaagcatgcgagagccggccaggtcgtggtcgatctcggcacgtcgtcggtcagccagacccgcgactttgccgggcagctcaaggccaagggggcggcctgggccgatgcgccgatcgcgcgcacccggcaggcggcgcaggacggcacgctcagcgtgatggtcggtgcggtgcccgcgctctatgccgcgatcgagcccttgatccgctgctttgccaccgacgtcaccaattgcggcgaggtcggcgccggccaggtgaccaagatcctcaacaacatggtgctgttcgagaccgtgaacgcgctggctgaagccgtcgcggtggcaaagcacaacggcgtcgatccaaaactgctgctggacaccctgtcgaaaggctccgccgacagcttcgcgctgcgcaaccacggcatgaaggcaatcgtgccgggcgtatttccggagcgcgcgttctcgaccgaatatgcgctgaaggatctgtcctacgcgctggagctcgccgccgacgccggcatcgcaatccgcggcgccgagctgatcggtacggtgttgcaggaggcgatcgacaagggatcgaaggataattatttccctgtgatcgcgaagcacatcgacaaggcgtagctccctccaccgccattccggggcgtgcgaagcacgagcccggaagccatcaggccgcacggtccgtagatcaatggattccgggctcgacgctggcgcgtcgccccgggatgacgagggggtggcctaatacacgtctttcgcgtcggcctcttcgctggtctgcaccagctcgaggctggtctcgaccttgccgagcaggcggccgaggtcgcggcgttcctgcgcggacaggcaggacaggatctcatgctccttgcgcaacagccgcgggatcagctcttcatacagcgcctggcccttcttcgttagccgcaggcggaattcgcggcggtcgtccgcgttctcgacgcgctcgacgatctcgcgctccatcagtgccgacactgcgcggctgatggtggatttatgcgtgcgggtgcagtgcgcgatgtattgcgcgctgcagggatcgctgcggaaaccgagcgtggcgagcacgcgccactccggaatgtcgaggccgtagcgcgcctgatattcgctcgacagcgccgaactcacctcggccgccacccggttgaggcggaacggcatgaagtggaacaggtcgaggcgcttcttcgccggtgcggcatcgtcgcgcgtgtctgcttccacggcgctgcgctgccggatcggaggctggctcgcagaggtcctagccaaaaatccctccaatttgagttgacggcggccccgactgggggtttaagatagttgcaagtgagactaatttagcaaggtcgcggccggcccgcaagatgctggtcgcaagccagtcacacacaagccgcagccaaaagccggcgcaagggaacatccagggtcacgcatggcaaacgccaactcggcacaggccaaaacccagttcggctatcgccgccaccccgaccaggagcggtcgggcgccaatgtggcggagcatccggtcgtcgtggtcggtgccgggccagtgggcttgtcgctcgcgatcgatctcgcgcagcgcggccagcgcgtggtgctgctcgacgatgccgaccggatcggcgaaggctcgcgcgcgatctgcttctcgaagcgctcgctggagttctgggatcgcctcggcgtcggcgaccgcatggtcgagaagggcgtggtgtggagcgtcggcaagatctttcacggcgcctcgcaactctaccagttcaatttgcttcccgaggaaggccacaagcggccagccttcatcaacctgcagcaattctacgccgaggcctatctggtcgaccgcgtcgagcaattgcccgagatcgatctgcgctggcgcaacaaggtgatcgcgctggagagccgcaacgacggcgtcgcgctgaccatcgcaacgcctgaaggctcctaccaggtgcatgcttcgttcgtcgtcgcctgcgacggcgcgcgttcgtcgctgcggcagatggtcggcgctgagttcgcaggccaggtgttcgaagaccagttcctgatcgccgacgtcaagatgacggcggcgttcccgaccgaacgctggttctggttcgatccgccgttccatgccgggcgctcggcgctgctgcacaagcagccggacgacatctggcgcatcgacctgcagctcaatccggatgccgatcccatcgccgagaagcagccggagaatgtccggccgcggatcgaacgcatgctcggacatgacaagttcgagttcgagtggatttcgctgtacaagttccagtgtcgccggatggccaggttcatccacggccgcgtgatcttcgccggcgattccgcgcaccaggtctcgccgttcggtgcccgcggcgccaattcaggcctcgaggacgccgagaacctggcttggaagctcgaccgcgtgctgcggcggctgtcgccggaaagcctgctggagagctaccacatcgagcgcagcgcggcggcggacgagaacatccgcgagtccacgcgttcgaccgatttcatggcgccggtgacgaagcaggaggcgcggctgcggcaagccgtgctgtcgctcgcggaggataccgagttcggcaagcgcatggtcaatggcggccggctgtcggtgccgtcggtctacgacacgccgctgtcgagtggcgatcgcgacgattggcgcggcggcccgcggccgggcgcctcgatgctggatgcgccgctgacggagcagggcggtggtgcgacctatctgaccgatgttttcatcaggcaggggacgcgcttcacgctgctggagtttggcaatggcacggctgtcgatgtccccgagggcgtcggcactatccgggtcggcggtgagggcgggctggtcgatgcgcgcggccttgccggcaagcgctacgatgctgagcccggcaccgcctatctgctgcggccggatggttatgtcgcggcacgcttccgcaacgcggcgcggcctgcgctcgatgcggcgctggcgcgcgcatccggcctgaattgaggtgttgctgatggcgctgtcgaccagttcgaacttcgcaaagcccgatgacgccttccgcgccatcgtcgaggcgcatcgcggcctcaccgaggcgcagagcgccgatctagatgccgcgctggttctggtgctcgccaaccatatcggcgatctcgacgtgctgtgcgaggcaatcgctttggcgaagcggcggatgccggacgcgagccagcagcagcaacagcagcaacaatagcacgggccaagcctggatgattttggttcaaatcgaacggcagcttccgcttcacctcgccccgcctgcggggagaggtcggaacgcatcgtcagatgcgttccgggtgagggggagcttccgcggacgcatctgtcaccgtttacgcggagacagcccctcaccccaaccctctccccgtaagaacggggagagggagcgcatgaagacaggattgaactgatggccaaaggtttcgcatcgaccacggatctcaccgagaagaaggtcacattctccgagatcggcaccgatctctacgctttcaccgccgagggcgaccccaacaccgccgtgatcgtcggcgaggacggctgcctggtgttcgacgcgcaggcgacgcccgcgatggccaacaaggtgatcgagcgggtcaagaccgtcaccgacaagccgatcaaatatgtcgtgctgtcgcattaccacgcggtgcgggtactcggcgcctcggcctatcacgcgcagggcatcgtggcctcgcaggagacctatcggctgatcgaggaacgcggccagcaggattgggattcggaatacggccgcttcccgcgcctgttccaggatgcggcaagcattcccggcctgacctggccgacgctgaccttcgagggcgagatgtcgatctatctcggcaagcgcgaggtgcggctgatgcagctcggcgccggtcacacctcgggcgacatcgtcgcctgggtgccggatgccgaggtgatgttctcgggtgacctgatcgaataccactcggcctgctattgcggcgatgcgcatctgcgggaatggccgatgaccttgaacgagatccgcgccttcaatccgaaggcgatcgcgccgggccgcggcgatgcgctgaagggcctcgagaccgggcgtgatgcgatcgcgatgacccgcgacttcgtcaccacgctctatggcgccgccgaatcgtccgtcgccaagggccgctccttgaaggaatcgatggcggcgacgcgcgaggtgatggatccgaaattctcgagcttcgcgatctacgagcactgcctgccgttcaacgtttcacgtgcctatgacgaggcatccgggatcgacgatcccgtgatctggaccgacaagcgcgaccaggaaatgtgggccgccttgcaaggaggaggatagacatgaacatcaatacctcgcctgatcagatcgtgcgcagctcggggcaagtgaccccgggctacatgtccggcttcggcaacagctttgagaccgaggcgctgcccggcgcgctgccgatggggcgcaactcgccgcagcgctgcgcctacgggctctatgccgagcagctctccggctcgccgttcacggcgccgcgcggcaccaacgagcgctcctggctctaccgcatccgtccgtcggtgcggcactccggccgcttcgccaaggcaaatagcgggctgtggcgtaccgcgccgtgccacgaatacgatatgccgatcgcgcaactgcgctgggacccggcgccgatcccgaagcaggacatgaccttcctgcagggcgtgcagaccatgaccaccgcgggcgatgccaacacccaggccggcatggcggcgcatgtctatctcatcaccaaatcgatggtcgaccagcatttctacaatgccgacggcgagatgatgttcgtgctgcagcagggcgatctgcggctggtcaccgagttcggccgcatcgatgccgagccgggcgagatcgtggtgatcccgcgcggcgtcaagttccgcgtcgagatcccgaatggtccggcgcgcggctatctctgcgagaattacggcggtgccttcacgctgccggagcgcggcccgatcggcgccaattgcctggccaattcgcgcgacttcctgacgccggtggccgcctacgaggacaaggacacgccgaccgagctctacgtgaaatggggcggcgcgctgttcaagaccacgctgccgcattcgccgatcgacgtggtcgcctggcacggcaattatgcgccgtacaaatacgatctgcgcaccttctcgccggtcggcgcgatcggcttcgatcatcccgatccgtcgatcttcacggtgctgacttcgccgtcggagaccgccggcactgcgaatatcgacttcgtgatcttcccggagcgctggatggtggccgacaataccttccgtccgccgtggtaccacatgaacatcatgtcggagttcatgggcctgatctacggcgtctacgacgccaagccgcagggcttcgtgcccggcggtatctcgctgcacaacatgatgctgccgcacggccccgaccgcgaagccttcgagcatgccagcaacggcgagctgaagccggtcaagctgacccgcaccatggccttcatgttcgagacgcgtttcccgcagcgcgtgaccaagcatgcggcgacgtcgtcgacgctgcaggatgactactcggattgctggaaggggttggagaagaagttcgatccgaccaggccgtagccagccgtcattccggggcgcgcgaagcgcgagcccggaatccattgctccgcgcgacacgtggcctgatggattccgggcctgcgccttacggcgcatcccggaatgacgagagataaagtgcgtcaattatttcggcaggagaccatgccccaccccaacgaccccaaactccgctccttcatcgacgtcgcgcccacgtccgactttccgatccagaatttgccctacggcgtgttctccgcgaacggactggctccgcgcgtcggcgtcgcgatcggcgattatgtgctcgacctctgggagctcgagcaggattctcggctcgatgtcgggccgctcggcgtgttctcgcagccgtcgctcaacgcgttcatggcgctcgggccgaaagtgtggtcggcgacacgggcgcggatcagcgagctgctccgctcggatcatccggagctgcgcgacaacagggaattgcgcgcgcgggcgctggtgccgatggctgacgtgaagctgcatatgccgtttgcggtttcgggctataccgatttctattcgtcgaaggagcatgccaccaatgtcggcgtcatgttccgcggcaaggacaatgcgctgcagccgaactggctgcacatgccgatcggctataacggccgtgcctcgaccgtcgttgcgagcggcaccaaggtgaagcggccgcgcggccagctcaagccgccgacggcagaggtgccgagcttcgggccctgcaagcggctcgacttcgagctcgagatgggcgttgtcgtcgggcaggcgtcggcgatgggcgagatgctcaccgaggcgcaggccgaggagatgatcttcggtttcgtcatcctcaacgattggagcgcgcgcgacatccagcagtgggaatacgtgccgctcggcccgttccaggccaaggcgttcgcgacttcgatcagcccgtgggtggtcacgcgcgaggcgctggagccgttccggatgcagggcccggtgcaacagccggagccgctggcctatctgaagcaggtgaggccgaacaattacgatctcgcgctcgatgtcggcctgcgtgccggtgcgatgaacgaggcgaagacgatctgcagcaccaacttcaaatacatgtactggtcgtcggtgcagcagctcgtgcaccacgcctccagcggctgcgcgatgaatgtcggcgatctcttagggtccggcacgatctccggccccgagaagcaccagcgcggcagtctgctggagatcagctggaacggcaccgagccggtcgagctcgccgacggcgtgacgcgctcgttcctcgagaacggcgactcgcttgtcatgcgcggctggtgccagggcgacggctaccgcgtcggctttggtgaagtcgaaggtacgatcgtcgcggcggagtgagttcgctggatagaacgaagttatcacggaagcaagaactcagctgcaatctcttttctcttcggccttatgagtcctgctaactcgccaagaaccgaaggcagctttgtgtggttgtcagagctgtcgtagccaatcaccacaagttttcggaggcgcttatttatctcgatgatatttggttccaagcccgcaggagaaatgacgtagtggggacgtgctctcgggtaacgaagtgcatacatctccattagagacgaaatcgccggatcgtccatggagaaaccaataaagagaaatgtgtaatttagtagaagcgtctccagaaaggcagaatacacggcactaccgaatgccatgcggatatactcggatcgcgagaagaccagggttcgtacgtcgtcgatcgtgccgtgaagcttgattagatatttgcctgactgatctttcaagatgttgaagatgtttgcgtcgatagctgtgatcacctgggggaaatgagtggcaaagcctattttgctttgccaagacatctcgagcagcttgtcgaagttagttgtgactatgattctctgatcgagcgctactatcgcctcatggagtggagagggctccgctgcttgaccgaattcttgcacgatctcgcgttcccatcgttcaccaaggtccatctgcaggatttcgcacgcgagcaggtagtctttttggtctaggagccgtgtaacctgttccttgaccgcggctccggctttgccgttcatctcgttgagaaaggcctcccagccctttattcttccacccgtacgggttgcggcgctcgcagatactccagcacctagaaagagaacgactcttcggcgagcgagatcatcgacaagatcggcattaaattcgctcatcgcgaatctcaggtcgcaacaacattttctagatagcgtatcgctatcccgcgatagatgtctcgcgcctgctttcgcagctgcgtgtagctgccggtgccccgcacggagatcattggtgcatgttgactctgagatcgaggagccaaacttccgaggtgacgaatatcacccaagtgaggatccactttcttcgcgtcgaagaacttgccgaggtgagctgatatctcagccgggaagttttggctgatgtcctggtacgcctgcacgatacgttttctggttgcttcgttctcctctgcagggtccggctcagacccacccctttctttgtgttgttgggtaacgtagccaacgaatcgtagcgatcgagcttgatcggccgctggaatctcagaggggtcctcagacaagctaatcccagttttaagttcgcgttgccacactccgacggtcgtaccaatgttccttatggcccaaagtgaaaaaatatcgatggccatcggaacgacgaagtagtccatcgctaacagaatcgatctgttgatggctcctaacgatggccccatgtcgaaaaacacgaaatcatagttcatttccttcgcttttccgaccacatctgcaaaaacaaaggtcgtgcgtattcctcgcattccgcctgctttggcatcgcgccagtcttgagcaaggaggtcttcctgcagtgcgaggcgtgggtctccgacaataatatcgaagccgaaatttcctgctttgacgataggtaggctggtgccatacccctttcctagggaaaggggccggatcacgctgtagacggacgtggggtcatttgctgaatagatatcgatccattcgtcctcacccagaacatactgagtaagattgcattgtggatcgccatcgacgacgagaacccgcgctccaaagttaagtgctagttccgcggccagatttgcaacgagcgttgtctttcccacgccgcccttattgttaaagaagcatgtggctttgactccactctcccggacggaatcgaatagttctttgtcttccgcatcaagtggcttgccggtagagatgccgcgttgtctttttgccactttatgcaccggagggttgtggattcttccttcgctattctaagcttggatgatgtgcgcgcaagcttagcgacaccgaagatgggtcctgctaacaggattgaacttgtaaggcgcgctatctctgttcaggtggtatatccttcagcctcgccgtatgcgccgcgcagtcctcgagactgtatttcagatgcacccgcttgtccgacggcggctggttcacggtgcagacgcctgcccgccagggcttggccgggcggatcggccgcggcgcaaagccgccgccgcagttcgggcagacattaccgagcttggtctcggcgcaatccgcacagaacgtgcattcataggagcagatccgggcgtcagttgcgctcggcggcaggtccttgtcgcaatattcgcagttcggtcgcagctgcagcgccatcgtcgcctctcttgccggatgttaaggaatgatcgcagatcggaccgggaaagcgaatgacggatttccctcgatttgtgccaggtcagctttgtaacgctttcaacggcagcttggtgctctccttcagccggtcgagcacgatcgatgagcgcacatgcgcgacgctctggtgcggcatcagcacgttgttgacgatgtcggacaggctcttcaggtcgcgcagcatcaccttgagcacgtagtcggcatcgccggtcagcgcataggcctcctggatgtcgtcgacccggttgaccagctcgcggaaccgcttggcgttgtcgggcgaatgggttgccagcgtgatgtggatgaaggcgatcaggccgaagccgagcgcctcgccggcgaggtcggcgtggtagcccgcgatcaccttctcctcctccagccgcatccgccgccgggagcattgcgaggctgacagaccgatcaggtcggccagctgctggttcgtcagccggccgtcatcctgcagcgcggcgagcattttgaggtcgaaggcgtcgacttctggcatgcaccgaatatccatttcatgcacaaatcgtgcgcgatactagcaaaacaagccctattttgcacgcacgttgcgcagcaagtgacggagactgatccctaggcaaatcagggagttaccgccatgggtccgtttccgcacgatgcgccgccagccgaaatcaccgacgacaatccgatgggcaccgacggcttcgagttcgtcgaatacgcccatcccaatccggctgagctgcacgccttgttcaagctgatgggctttgtcgcggtcgcccggcacaagaccaaggcgatcacggtctaccgccagggcgacatcaactatctcgtcaatgaagagcccggcagccacggcttcaacttcgtcgccgcgcacggcccgtgcgcgccgtcgatggcgttccgggtggtcgatgccaagcacgcctatgagcgtgcgatcgcacttggcgcggagccggcggatgtgtcgtccgcggagaagacgctggatgtgcccgcgatcaagggcatcggcggcagcctgctctatttcgtcgaccgctatggcgccaagggttcggcctatgatgccgagttcgactggctcggcggcgtcaatccgcgtcccgccggctcgggcctctattacgtcgatcacctcacccacaacgtccatcgcggccgcatggacgtctggaccggtttctatgcaaaactgttcaacttccgccagatccgcttcttcgacatcgagggccgcgcctccggcctgttctcccgcgcgctgaccagcccggacggcaagatccggattccgatcaacgaggacgccggcgattccgggcagatcgaggaatacctcaacatctatcacggcgagggcatccagcacgtcgcctgcggcgcccgcgatatctatgcgacggtcgagcggttgcgtgcggacggcctgccgttcatgccgtcgccacccgacacctatttcgagcggatcgatgcccgcctgccgaagcatggcgaggacgtcgcgcggctcaagaccaacggcatcctgatcgacggcgagggcgtggtcgacggcggccagaccaaggtgctgctgcagatcttctcggcgaatgcgatcgggccgatcttcttcgaattcatccagcgcaagggcgacgacggcttcggcgaaggcaacttcaaggcgctgttcgaatcgatcgaggaagaccagatccgccgcggcgtgctcaaggtcgaccacgcggcgtgagcacagcatagcgtgctatgtagcgcacaacaaaaggtgtcgtcccggcgaaagccgggacccataccgcggaatctatcgcgtgtgtcggatatcaatcccgcggaacggtcgtgcgcaacaacggccttccggggttatgggtcccggccttcgccgggacgacagcgaaattacttccctgccttccacgcgctcgtcacatccccaatgctcgccaactccggctcacggatggcggacggcgtgcgcgagaaacgcggtgcaggggcgggctgggtgacgccgtggcgttcgacaaacacctggcgggccgccatgtgcggatgcttgggcgcttcctccatggtgaggatcggcgcgaagcagatgtcggtgccttccatgatcttgcaccagtcggcgcgcgacttgctcttgaaaaccttttccagcttcgccttcagcgccggccaggccttgcggtccatctgggcgtcgaagtcggcgtcggtcaggtcggcatgcttgcgcagcagcgcgtagaactgcggctcgatcgagccgatcgagatgaagttgccgcaggagcactcgtagacgccgtagaaatgcgcgccgccgtcgaggaaattctggtcgcggccgccgctccagcggccctgcgccgccatgtcgtagaacatcgacatcagcgaggccgcgccgtcgcacatcgcggtatccacaacctggcccttgccggacttctgcgcttccagcagcgcggcgagcacgccgaccacgaggtagagcgcgccgccgccgaaatcgccgaccagattgagcggcggcaccggcttctccttggtgccgatcgcagcgagcgcgccggtgatcgagatgtagttgatgtcgtggccggcggcgttcgccagcgggccttcctggccccagccggtcatgcggccgtagaccagcttcggattgcgcccgagcacgacatcggggccgaggccgaggcgctccatcacgccgggacggaagccttcgatcagcgcgtcggcatggctgagcaggtcgagcacttctgatatcgccgccttgttcttgagatcgagctcgataaccttgcggccgcgggtcgccaccgccttcaaattcttgcccgcgccgacccggtccagcgtgatgacctcggcgcccatgtcggcgagcagcatgcaggcaaacgggccgggaccgatgccggcgaattcgacgatgcggaagcctgtgagcgggcccgaggtgcgagcggcggtttgggaggcgggcttgtcgagcacgttgttgttccgttgttgctgtgagggagctggtcgaagagtctgtggatcggcgcgccgggcgtcacgccggctcgatgtcagaagtccggtccggcgattgggggccgtggcaagtggtgctgccgaacctcattaagtcctctccccggggccgcccgtctgacggtatttttaattagctgattagctaaattctctcgcctaatgggggacgtggcaagctctttcggctggaatgccagcaaaacgcgaacggcgcgcatcgctgcgcgccgtctgcatgggttcaggagggatagcggctagccggccgcggtcaccgcccgctgtcccatcaccttgaccaggttggcgcggtaatccgccgagccgtggatgtcggcgagcaggccgctcgccgggatcgtcacgctgtcgagcgccgaggccgcccagttcgccttcagcgcctgctcgatcggcgccacccgcatgacgccgctttgcgaggcgccggtcgcggcgacgcggacgtcacccgccttggtcttgacgacgaacacgccggtcagcgcgaaacgcgaggccgggtgccgcatcttggcatagccggccttggcggggaccgggaacgacacggcggtgatgatctcgccatcctcgagcgccgtcgtgaacaggcccttgaagaagtcctccgccgggatcgaccgtttgttggtcttgaccacggcgccgagcgccagcaccgccgccggatagtccgccgccgggtcgttgttggcgagcgagccgccgatcgtgccgcgatgacgcacggcaggatcgccgatcatcgacgccagatgggcgagcgccgggatcgccttctgcacggcgtcgctttgcgcgacgtcgtaatgcgtggtcgcggccctgatggtgacggtatcgccggacacgtcgatgccgatcatgtccttgatcttggcgacgtcgatcacgtcggacggagcagcgaggcgctgcttcatcacagggagcagggtctggccgccggaaaggaacctggagtccgtgcccttggcgaactgcgccacggcatcgtcgatcgaggatgcgcggtgatagttggtctcgtacatcgtatcctccctcaaccgtgaatggcgtgccagacgcgatcgggcgtcgccggcatttccagcttgttgttgccgatcgcgtccgtgatcgcgttgatcacggcagcagaggcgccgatcgcgccggcttcgccgcagcccttgacgccgagcggattgcccggacacagcgtcgtggtgtgggagagctggaacgacggcaggtcgtcggcgcgcggcatggtgtagtccatgaacgacgcggtcacgagctggccggtgtcgtcatagaccgcaccttcgagcagcgcctggccgatgccttgcgcaagaccgccatgaacctggccctcgacaatcatcgggttgatcagccggccgaaatcgtccgccgccacgaagttgacgaacgaggtcttgccggtgccgggatcgacttcgagctcgcagatgtaagcgccggccgggaaggtgaagttggtcgggtcgtagaacgccgtctccttcaaaccgggctccatgccgtcgggcaggttgtgcgcggtgtaggcggcgagcgcgaccatcggcagcgcgatcgacttgtcggtgccggtgaccttgaactcgccgttctcgatcacgatgtcgctctcggacgcctcgagcgcatgtgccgcgatcttcttggccttggcctcgaccttctccatcgccttcacgatcgccgtaccgccgaccgcgagcgagcgggagccgtaggtgcccatgccgaactgcaccttgtcggtgtcgccatggacgatcgagacctggctgatcggcacgccgagccgctcggcgatgatctggcagaacgtcgtctcatggccctggccgtggctgtgcgagccggtgagcacctcgatggtgccgaccgggttgacgcggatttcagccgattcccacaggccgacaccggcgccgagactgccgaccgccttcgacggggcgatgccgcaggcctcgatatagcaggagacgccgatgccgcgcagcttgccactggctttcgccttggccttgcgggccgggaagccggcatagtcgatcgccttcatcgcggcgtcgatcgaggcgtggaagtcgccgatgtcataagccatgatgaccggcgtctgatacgggaacgtggtgatgaagttcttcttgcgcagttcggccggatcgaccttcaactgccgcgccgcggtctccatcatgcgctcgatcagatagctcgcttcggggcggccggcgccgcgataggcgtcgaccggcgtggtgttggtgtagacgccgatcacctcggcatagatcgccgggatcacgtactggcccgatagcagcgtcgcgtagagataggtcggcaccgccgaggagaacagcgacatgtaggcgccgaaattggcgtgggtcttcacccgcaggccgaggatcttgttgtccttgtcgaacgccatctccgccttcgagacatggtcgcggccatgcgcgtcggtgaggaaggcctccgatcggtcaccggtccacttcaccgggcgacctaccttcttcgaggcccacagcgccaccatctcttccggatagatgtagatcttggagccgaagccgccgccgacgtcgggcgcgatcacgcgcagcttgtgctccggcgcgatgttgtagaacgccgacagcacgaggcgggcgacgtgcgggttctgcgaggtcgtgtagagcgtgtagtgctcctcggcttggtcgtaatgcgcgaccgctgcgcgcggctccatcgcattcggcaccaggcggttgttggtgaggtccagcgtcaccacgttggccgccttgctgaatgcatccttgaccgcggcttcgtcgccgagatgccagtcatagacgatgttgccgggagcctcggggtgcagctgcggtgcgccgggcttgatcgcggccttgatgtcggccgcggcgggaagctcctcgtaatcgacgacgacggcttccgccgcgtccttggcctggttcttggtctcggcgatcaccaccgcgaccgcctgtccgacgaagcgcacggtctccggcgccatcgccggccatgcgcccattttcatcggcgaaccgtccttcgaggtgatcgcccagccgcagatcagattgccgaccttgtcgtcgacgatctgctgcccggtcagcaccgcgatcacgccgggcatcttcatggcctcggccgagttgatgcccttgaccttggcatgggcatgcgggctgcggatgaagtgagcgtaactcatgccgaccattttaacgtcgtcgacgtaacgtccttgtccggtgatgaaccggcgatcttccttgcgcacgacgcgtgcgccaattccttcaacacccatggtctggtcctcccgaccggagattcgaattgccgccgtttccatcgagaccggcggtgatgagcttgatcgtgtgcggtgcgtagcgcgctattcggcggcctgcgccaccttcatgcggccggcagcgtcgagcaccgccttgacgatgttgtggtagccggtgcagcggcagatgttgccttcgagctcgtggcgaaccgtttcctcgtcgagcttgccaccatggcggtgcacgatgtcgaccgcggacatgatcatgccgggggtgcaatagccgcactgcaggccgtgattgtcgcggaacgccgcctgcatcgggtgcagctcgtcgcccttggcaaggccttcgatcgtgatgacgttggagccagccgcctggccggccagcatggtgcaggatttgaccgcccgtccgtcgacatggacgacgcaggcgccgcactggctggtatcgcagccgacatgggtgccggtgaggttcagattttcgcgcaacaggtgcacgaggagggttcggtcctcgacgtcgaccgagaccgccttgccgtttaccgtcagtttgactgtagacacgcgtttctcccaatagcttcgttatgggcccagtagaccacgcttcatgtgggtcgtaaccgcgatcaaagtcgtagttgcggccctgtcatgaaggctccgggctgtggctgcgatcctagcaggcagccgttcaatgggcaatttgcaagctgctttcggcgtgctccggcgcgacgaaattgcgcggcagcgcaacgggttctccgcctgctggtctggtttgcggcatatcaaaaaccgccgcggcgattgctactaccttccgcctataacgacaaaaaagcgtagctggcattttcatcgcgacatagcgaccgaagatcgctggttcacgaattgggtagtgagacgcgcgcgcgatgcatccatcgcggcaacgaaaccatattggaggaagccaatgaagctgaggagcgggattttctttgccggcgtgtcgctggtcgccatggtgatggcaggaattactgcgtcgaatgcgaatgattccgttgcaaaggcggtgtccgatccgaacggatgggcgatcgccggccacgattacggcaatacgcgcttcagcccgctgaagcagatcaattccgagaacgccggcaagctgcaactggtctactcgctgtcgctggcctcgctgcgctccaacgaatcgtcgccggtcgtgatcggcaagaacctgtatgtctcgacctcgtggggtccgaaatacgtctacgcgatcgacgccgcgaccggcgcccgcaaatggacctggcagcccgacattccggatgacgtgcttcaatacgcctgctgcgacgtcaataatcgcggcgtgtcctatgccgacggcaagatcttcgtcggccggctcgacggcaagctgaccgcgctcgacgccgaaaccggcaaggagctctggacctcgacggtcgtcgactacaagcaaggctcggtcatcacctcgccgccgctcatcgtccgcgacaaggtcatcaccggcttcggcggtggcgaatatggtgtgcgcggcgcgttgcaggctttcaacctcaaggacggcaagctgctctggcagaccttcacggtgccggcgccgggcgagcccggcagcgacacctggaagggcgataccgggctgcatggcggcggcgccgcctggctggtcggctcctacgacgccaagtccgacaccgtctactggggtaccagcaatccggggccgtggaataccggggtgcgctccaccggcgacggcaatttcggcaagctgaccaacctctacaccgcctcgacgctggcgatcgatcccaacaccggcaagatcaagtggcacatccagggcaccccggccgacgcctgggactatgacggcgtcaacgagctgctgctcgccgacctgaagatcaagggcgccgagacgccggtcctgatgaaggcggatcgcaacggcttcttcttcgtggccaaccgcgagaccggcaaggtgatctcggccgagaagtacgtcttcgccaattgggccaagaagtgggacatcaacacgatgcgggcggaagaggatccggacaagcgtccgggccccggccatcccgccaaggacatctgcccgaacctgatcggcggcaagaactggcagccgatgtcgttcaacccgcagaccggtctcgtctacatcccgaccaacaatgtctgcatggactggtcggtctccgacgtgaactacaagcgcggcgtgttctatctcggcgccgaattcccgaccaaggcgggtcccggcggcttcctcggcgagctcgtggcctgggatccgatcgccaacaagaaggtgtggagcatcaaggaggacctgcccttcaacggcggcacgctgacgacgggcggcaatctggtgttctccggcaatctgcacggcgacttccgtgccatcgatgccaagaacggcaaggtgctgtggagcaagaacctcggcagcggcattggtgccggtccggtgacctattcggtcgacggcaagcagtatgtcgcgatcgtggtcggacgcaccgcggcgctgccggccttcctcggtgacatcggcaagcagatggtcgccgcggcgccggaaggcggctcgctcttcgtgttcgccctgcagtaacgaccgtcgcaaggaggcagcattgtccgtgtcttgcatcaaggcgacttgcatgaaggcgactggcatcaagtcgaatgacgtgccgagctcaacgcgtagcgtacagttgaggatggcgatccggaccgtgctgctctccgccgcattgttggcgccggccctgtcggccggcgcggaagaggccaggccgtcgctacggctctgcgccgatccgaccaacttgccgttctcgagcgacgaaccgggcaagccgggcctttatctcgagatcggccaggcggtggcgcaaaagctcggccgcacggtgagctataattggtacaagtcctatttcggcaagcgcacggtgcgggagacgctgctcagcaagcattgcgatgccatggtcggcctgccgctgatcgacgatttcatgggcccggcggtgatcttctcgaagccgatcgcccatgaaggctatgcgctggtcggcgccacggatcgcaagctcgccggtatcgacgacctcaaggggttgcgggttgcggtgcagtatcagtcgacgccgcagaacctgctggctttgcgcgacgacatccagaaggtcaccgtgctgagcccggaagagggcatggcggccctcgaccagggcaaggtggacatcgccttcatctgggcaccggtggcgggttggctcaacaagaccagctacggcgacaaatatcagatcgtctcgaccgagggcgacggcctgctctgggcgaccgcgatcggcttcgccaaggcgtccggcgcgctgcgcgatgaggtcgacggcgtgctgccgtcgctgcagggggacatcgacgccctgtttgccaaatatggcgtgccgaacggcgccccggtgaagttcggccaggcgaccacctcgtccgccggagcaagcgagccggtcacgatcgggcaggcgactgctgccgagaagccggttcagaccgccgcgaccaccggcgaagtcaagggagacgccaaggcgggccgggaggtcttcaatggcacctgtgctcattgccacggtccggacgcggtccaggccgagcgaaagatcgatctcaggctgctcaagaagcgctatgctgacgacatggaatcgacattctggaagaccgtccatgacgggcggccggccaagggcatgccggcctggaaggatgtcttcagcgacgacgagctcagaaacgtatatgcctatctgcagagcgtgcaggataccggcgggtcgaactagaagcggccatcggcaaataccaatgcgagggtcctcatgatggggttcctgatcatcgacgatcaccccctgttcggagaggcgcttggcaacgccatccgcatctcgcatcccgatgcccggatctatgaggcgacctcgatcaagggtgcgctgggcatccttgccagcgagccgaatatcgatctggcgctgctcgatctgctgctgcccgacgtcgtcggtttttccggcttccagaagatcagggatcgccatccgcggctgccgatcgccatcgtctcgagcgaggaggacaagcacaccatccgcgaggcgctggaaatgggcgcggtcggctatctgccgaaatcgacctcgctcggcgaattgtcgcaggcgatcgcacgcgtgttgagcggatcggtctcggcgccgcgggatttcgtcgcggtcggcgcgctggagcagtccgagacggcgcggacgctgcgcgagcggattcagaagctgaccccgcagcaaattcgtgtccttcacctgatcatccgcggcttgcagaaccgcgagatcgcatcggaactcaagctcgcggaatccaccgtcaaggcgcatgtcaccgagatcctgcgcaagctgaagctgttcagccgcaacaaggcgatcatcgagctcggcaagattccgcttcccgcccttgaagccggcctgggtgcgaaggccgaaaaggcgccctaagcgcgatgagatttggttgaatcatcatcgcgctttagacctttgtttgagcatgatctttcggaaaaccgcttcgcacttttccggatcatgctttagccttgctgcactgcacggcgaacgcatccggggtgcgccctataggctgccggtcagctttgagataacgtcgtgcgcacaatggctgtcatcagcgatccgagggagggcggcgcagcgttgaccacgaccgtgcccctggcgggcgagccgccgctcggcaaggcgggtgcgcctcgactgctgatcgtcgaggatcatccgctgttccgtgctgccctgatcggcgtgatcggggccgagtttcccgatgccgaggtattgcaggccacctcgatcgatggcgcgcttgacgtgatcgccgcgcgcgatggcctcgatctgatcctgctcgatttgtcgatgccggggaccacgggcctgctcggggcctaccgggtgcgggccgcggcgccgcgcagcgcgctggtgatcgtatccgcgcatgacgattcccggatcatcggcggcgcgatctcgctcggcatttccgggttcattcctaagtcgacgccgaaggtcgagctggcgcgcctgctgcgcggcatcctcgaaggcgaggtgtgcctgccgacgcgcttccgcgacgccgctgccgcgcggaaagcccaggccgagaccagggagctggtgcagcagctcggccagttcaccgcccagcagctgcgcgtgctcgacatgatctgccgcggattgcagaacaagcacatcgcctatgagctcgatatctcggtcaccaccgtaaaggtgcatgtctcggagattttgcggaagctcggcgtgcgcagccggaccgaggccatcatcgcgctgtcgaaactcgacttcggcaagcacgaccatgcgccggtgacggcggcgccgccgtcgcacggcgcctaaagcgggatgagttttggttgaatcggcttggcacggtcttccttcacctctcccaagggagaggtgaacttcgatgccgttccagctcaacctgatctcatcaggcccttgagcctattccgttccgatcgcatcggaacggggttccaggtttgttgtcttgacgcgtttacttcacgcgaaccggtatccaggtcgttcgcaaacgctctggtcatagccgcgggcccgattgctccgccgccagcaggaacgacagcagcgagcgcatctcggcgggcttgatcggcttcttcaggagttcgtggccaaaggccgacacgtcggaggctgccttggccgagtagtcggcggtgacgatgatcgccggcaccttggcgttgatctcgccgcggatcacgtcgacggcctggatgccggtctcgccgttgtcgagatgcaggtcggcgatgatggcgtcgggaacgccgtcgagcgcgtggatacgctcgagcgcctcggtcttggagatcgtcaccgcgacgtcgcagccccatttctccagcagatgagcaaggccctcggcgctggagaggtcgttctcgatcagcaggattttcgcaccctccatgccgccatagcgatagtcgacgctggcctgctcgcgcaccgggatcgctaccggatcaaacgtgcgcggcacggtgaccgagaacaccgagcccttgccggcgcgcgagcgcagcctgatgtcatggccgagcaggtcggcaaaccggcgcacgatcgaaaggccgagcccgatgccggccttgtcgccggcgccggcgtcgccgcgctggaattcgacgaagatcgcctcgcgctgggcttccgggatgcccggcccggtgtcgtgcacctcgatgcagatatcgtcgcccttgaggcggcatcccatcagcacggtgccgcgctgggtgtagcgcagtgcattggccaagaggttttgcaggatccggcgcagcatcagcggatcggagcggaccaccgccgacgacggcatgatccggaagtcgaggttgcgcttggcggcagtcgccacgaattcctgttccagcggctcgaacagcgaggcgatcgcgaccggaccgaattcgggccggagcacgccggcatcgagcttcgagatgtcgagcagtgtccgcagcatgtcctcgagcgtcgcgagcgaacggtcgatctggtcggtcagcgcgacactcttgggctcggtcgccgtttcggtcagcgcggacagcgtcagccgtgccgcattcagcggctgcaacaaatcgtgcgtcaccgaaaccagcaccgacgacttcagcgagcttgccgcctcggcctgctgcttggcctgcagcaggcgtccattggttttctccagcgattgcagcgcctgcttgagctgctgggtgcggtcgcgcacctgctggtcgagcgcgatcgcggtctcgaacagggaaaaggcgttgagctgctggtcggtggagcgctcgacgcgcgacatcagcgccgcgttgatcttgcgcagcttttcggcttcgcgttcgagggccgcaatgcgcgtggtcttgctgtcggtcattgcggcgcgacagcgcgcttaccgatggcgatgccggtcagcgtctggttgacatgcatggagcgatactgctcgccataggtctgaaagccgatcactttattgcggcgatagagttccgacatctcccgggaaagctggcgctgctcgacgtcgagccggcgcagcacgcattcgaagccgatgaacatcgagacctcgccgagatcctcggtcagctccttgagcaggcggcttgtgacgtcgatcggatcgcgctcgcgcgccaccgtcagcaccatgccttcgtcgatggcgcagaagaattgcagggatccgtcgggattggtgcgctggatcgaccgtgcgtaataggcaccgccgacgcgcaccaggaccggatgcgccgcgaacgagaacagttcgagcttgttgtcgctgaggccgacggcgcgggaatattccagcgcggccggctcggcgttcaactccttgacgatgcggtgctcgatgtcggcctcggtcaccaccatcttggtcgaggtcggctcgaaatggtcgcacttgaacaggcggaacggcagccgggtccggatcaggatcaggacggcggcgtcggtatgggccgcgccgccgtggaagacccaggacttctcgaagcgcaggccgtcgccggcggagccgccgaccaccgggatgtcgccgagcgatgcgtagatcgccgacatgatggtttcctcgcgctgacacatgccgtcgatgaagagtagcccgaaggactcgtcggtgtgatcgcaatgctcggtgcgctgcgcgaattcgctctgcaactcggtgcagatcgagcggccatgatcgacccggaacgtcgcgagatcgaacagcggccgggcggcgatgacgaaatcggcggcgtcaaagcccatcgcgaccacgctgtcctcgtcccagccgccaggcgacaattcgccggccgtggtgcagccgaagatcggcacctcgggcatccggccggacaactcggcaatgaattgttgcgggtcatagaacggtgacacgaacaccacgagcatggcgagatcggccgccgccaattggcgcgcgatctcgtcggcggcttcccgcggcccgttggtctttgcctgcaccacgacaatgctgtcggcggcgctgccgttctgcttcgccaaaggcgttctccctgaccagaatctgttgcttttcttggcgcggctggttctgcccgcgcgggtctcaagggcatccgggccatgccgcgatggttcgcgatccagccagcctttatctcttaggtcgtgagggggaatgtcattggccgggcgacttcgccggcagccgtgctcgccgcaagcgccaacggcgccgctcgacgcgatgacatgggacacctcccgatgtgttctcctggcccgggcagggtcaggcttgatccattctaaactatcgggctgccgccacgcgtcaatcttcggtttgggccgaccaaggtagtaccggatcactacggggcgaattgctgcccatttaccgggccttatcgattctgccttagttttgccctccggggactggggcgggttgccgccggaccccgcgtggttttcagaatgaagacgggggttggaatgccgggactgaagcgatcgctctcgatcagactcccaaccctccgattccgcgccaagatcatgctcggctttgccgtcacgctggcgctgtcggcagccaccatgggcttcgcctatctgggcttcgagcgggtctccgccggcgtcggctcctatcgccagagcgtcgcggaagccgatctggcccgcaacatcgatcgcgaattgatctcctaccgttcgctggcgcgttactacgtcgcgaccggcaaggaggatgacgccaaggccgcactcgccgccgaggccagcctgaaggacgccatcacggcgtcgatgaagggcaccaccaatccggcccggctcgaccagatcaccaggctggagcgtgaattccgcgccttcaccaagatctttgccgagatcgtccgcatcaaggacgacagtgcgcagatcgcgcagaacaagctgacccgcagcgcaacctcgatgcgctacaagctcgatgatctgccgagcaacgccgacgattccgagctgcaatcgatccagttcggcgccaagaaggtggccgaccagctgcagtcgatcaccggcgcggtcaacagcttcgtcgtcaatggcgacaagaccgtcgcctccagcgcacttgcccggctgaaattcgccgacaatctggtgaagggcatcagctcgaaggacgagcggatcacccagagcgtgaaggacatcaccgcgctgctcgaggaataccgcgaggcgctcgccaagctgatcgcgaatgccaagtcgatcgacgagctgacggtcgagatgacggaatccgcggccgcgatcagccagggcgcggcggcgatgaagtccgatctgctcgccgaccagaagcggctcgaaaccgaatcgcacgcgatgatcggtgaaactgagcaactgatcctgatgctcgcggccggcagcttcgtgctcggacttggctgggcattcctgctcggcaagggcatttcgcgtccgatcgcggcgatgtgcgcggcgatgcgcgagctcgcggcgggcaatttcgacgtcgtgctgccgggcctcggccgtcgcgacgagctcggcgagatggccggtgccgtggaagagttcaaggtccaggcggtcgccaaggccgagcgcgacgccgcgacccaggaagcgcagaacaaggccagcgcgaccgcgcggcgcgcggagctcattcgcttcgccgacgaattcgaatccgccgtcggctcgatcgtctctaacgtgtcggcgtccgccgtgcagctcgaatccgcggccggtaccctgacccggaccgcggagaccacgcagaatctgtcgagccaggtcgccggcgcctccgaggaggcctccagcaacatgcagtcggtggcgtctgcgaccgaggaattgtccgcgtccgtcgatgagatcggccgccgcgccaaggaatccagccagatcgccgattccgcggtgcgccaggccgagcagaccgatgcgcggatcggcaagctctcgcgcgccgcgcaggagatcggcgacgtggtcaagctgatcacggcgatcgccgagcagaccaatctcttggcgctgaacgccaccatcgaggccgcgcgcgcgggcgatgccggccgcggcttcgcggtggttgcctccgaggtgaagtcgctggcgagccagaccgcgagagccaccgacgagatctccacccacatcacgggtatgcaggccgcgacgcaggaatcggttgccgcgatcaaggagatcggcggcacgatcgggcagatctccgggatcgcgaccaacattgcaagctcggtcgagcagcagagcgcggcaacgcaggaaatcgcgcgcagcgttcagaacgtcgcgcaaggcacccaggaaaccgcatccagcgtcacccaggtcaaccgcggtgcggccgagaccggagccgcctccgaggaagtgctgaactcggcgcgttcgctgtcggtcgagagttcgcggctgcgcgaggagctcgatcgcttcatggcgaacatccgcgcggcgtaagcacgccggtctatccaccgtcgtcctggcgaaagccaggacccataaccaccactgttcgttggtgtgccggcaactcgccgctcgccccttgcgaaggccgcggcgtatgcgtcctggcattcgccgggacgacgacggagaacggcgtgccgtaatcccgattcccatgccgcattgcgggaacctcagctagcctgcggcgttgacgtcgcgtggcgggcacaccgtttgccgcaatcctgggagatagaaccttggaacccaacgttccggggtttttctcattggtccatactgatgacactgcagcggacacgattgagctctgcgacgacgcacgagggtgtggctgccgccgtgccgggcgatgaccgcatcatcgagacctcgattccgcttcgtctcgacagcctcagctggagcggctttcacacccgcgttgtgctggcactcggcatcacctggattctcgatgggctcgaagtgacgctggccggggcgctgtcgggcgcgctgaaggagagcccgacgatgagcttctccaacgccgacgtcggccttgccagcagcgcctatctcgccggtgccgtgctcggcgcgctcggcttcggctggctgaccgaccggatcgggcgcaagaagctgttcttcatcacgctcgcggtttatctttcggcgaccgccgcgaccgcgctgtcgtggaatgtcgcgagctacgcgctgtttcgctttctcaccggcgccggcatcggcggcgaatacaccgcgatcaactcgaccatccaggagctggtgccggctcgctatcgcggctggaccgatctcgtcatcaacggcagcttctggatcggggctgcgatcggcgcggtgagcgcgatcgtgctgctcgaccctgcgttgcttgcgcccgatcatggctggcggatcgcctatttcaccggcgcggcgctcggcctcgtcgtgctgttgatgcggatgtggatcccggaaagcccgcgctggctgatgatccatggacgccccgaggaggcccacaggatcgtcggcggtatcgagacagccgtgctcggccacgaacagccgagtgaaggtttcgagaagatcaagctcaagatgcgcgatcacaccccgctgcgcgaggtcgcggcgacgctgttcttgacctaccggcaacgctcgctggtcgggctcacgctgatggccgcgcaggccttcttctacaatgcgatcttcttcaccttcgcgctgatcctgaccgatttcttcggcatcgcggccagcaatgtcggctggtacatcctgcccttcgccgccggcaatttcctcgggccgctgctgctcggccgcctgttcgacacgctgggccgccgcaccatgatcgtgctgacctatggcgcctcgggcgtgctgcttgcgctatccggctatctgttctcgatcggcgtgctcagcgcgcagacccagaccatcgcctggatggtgatcttcttcttcgcctcgccggcggcgagcgccgcctatctcaccgtcagcgagacgtttccgctggaggtccgcgcgcttgccatcgccgttttctatgccgtaggcaccggcatcggcggcgtgatcggaccggcgctgttcggcgtgctgatcgacaccggatcgcgcaacagcgtgttcgccggctacctgctggggtcggcactcatgatcgccgccgcagccgtcgcatggcgctacgccgtcgcggccgagcgaaaatcgctcgaatccgtcgcgcggccattggcatttgtggagtagactatgacgaagcatgaattggccgaaatgccgcctgatgataaaatcgcacctcgcgggacgaccggcagcatgccggcgccggcgtcgctgattccgccgctggatcggaccgcggtgctgctcgacatcgacggcactttgctcgatttcgccccgaccccgcgcgaggtctgggtgccgccggagctcgcggccacgctgaagcaattgcatgaccgcaccggcggcgcgctggcgctggtcagcggtcgctcgctcaacgacatcgacctgatcttcgcgcccgaagcattccccgcgatcggcggccatggcgccgagatgcggctgcagccggacagcgaggcggttgccgcgcacgcgccgccgctcgacaaggaattgaagcgccgcctcgccgcgatcgcaaagctcagccccggcattctgctcgaggacaagggttactcgctggcgctgcactatcgcctcgcgccgcaggcggagaaggcgatctatgaagcggtttcgctgatccgcgccgagctgccgaatgcgccgatcgaggtgctgccgggcaagagcgtttgcgagatcaagcattccggcttcaccaaggcgaccggcgtgcgccaattgatgacgcatgagccgttcaggggacgccgcccgttcttcatcggcgacgacgtcaccgatgagacggtgttcgcgatcatgcctgacttcaacggtctcgcattctccgtcggccgtcacgcgctcggcgtcgacggacatttcgaaggcccgagcgatgtgcgcgcgttcctcgcgcggctgctcgacgatgatagggacgtcaatctgtcctaaccaaatcaactatgtcgcgcgctcgaatcgaatgcggttgttttgcgtcgtggcgtttgcctcgcatgaatttttcttttcgcgagttcccgcgagttccatgcgtcttcgccagaatttggtttcatttgggagattccttgatcaggaaccatcttgatgaatggttgttaatacgcgagttgaccaacaggaggggacctggtgaacctcgtcgtcgtatcgaaccgcgtttcgcgcggaaaacccaatgaacccatgacgggggggcttgctgcggcattgttgccggtggtggaaaagacaggggcaatatgggttggttccagcggacgggtccgcgacgggaaccacaaggaaccttttgcagaggtcgaagctctcggtgcgggcgcgctggcgatgctcgatctgccggccgcgcactatggcggctactacgaaggctttgccaattcggcgctgtggcccgcgatgcattcgcgcgccgatctgattcgcgcttcgcacgaggactacgcgagctatcgcgcggtgaacgcgttcatggcgcgcgcgctgctgcgtttccgcaagccggattccgtgttctggatccaggactatcatttcctcgcgctcggcgccgaactgcgcgacctcggcgtcacgcagccgatcggcttcttcctgcatacgccgtggccggcgcgcgcggtgatcgcgggcgtgcccaatcaccgtgagctgatcgaggcgatgctgtcttacgacctgatcggcttccagaccgacgaggattgcgagaatttcctcagctacgtgcagcacgatctcgatttcgaggtgcgcgacggcattatcaattcgtcgttcggccgcacccgggccgcggtatttccgatcggcatcgatcccggcaagttcgcgcagcaggccaccaaggcgatgacgcatcccgacgtgacgcggctacggcgcagcctcaacggcgagaagctcgcgatcggcgtcgaccggctcgactattccaagggcctcgtcaaccgcatcaaggcgttcgacaagatgtggtcgctgtatccgaacctgaagcgatcggcgtcgatgctgcagatcgcaacgccctcgcggggcgcgatcgaggcctatggcaatctcgccagcgaggtggcgaagctcgtcaccgacgtcaacggcgtgcacggcgaggtcgactggacgccgatccgctatctcaacaagggcttcggccagggcgtgctcgcagggctttaccgcaccgcgcaggtcggcgtggtaacgccgctgcaggacggcatgaacctcgtcgccaaggaatatgtcgccgcgcaaaacccggccgatcccggcgtgctggtgctgtcgaaattcgccggtgcggcgaacgagctcgacgccgcgctgctggtcaatccgcacgacatcgacggcatggcgcgcacgttggcgaccgcgctggcaatgccgctgaccgagcggcggatgcgctgggaagccatgatggagaagctcaacggcggcaccatccagcaatggttcgccgatttcatcgaggcgctgcaggatacgcacaatgccggagccgcagcgctgcccgagccaacatccctgtggccgcgccgcgcggcggattttgccgcgcgatatcactgagcgactgtcggccttccctgagcgccttgggctgtgcaatggcacagaggggaatgatggaggcgggccaatcggcttgatttgcgccggccactcgccggcgctggcaagagccgtctgcgatggccccgcgcgcggccgacgttgccgagaatttacccaatattttcaatccgttggggaaatttcgcggttcgaccccgcgctcccttgcaaaatccgcctcagcccttcaagagaggcctcccggagagatggccgagtggcttaaggcgcacgcttggaaagcgtgtgtgcgggaaaccgtaccgtgggttcgaatcccactctctccgccatcgctcaaaatagcctgcttcgctgctctccggtcttctcgccactgtctcgatgcgccggtagtgggataaccctgcatgggtgtgccgacataccgacggaatgcggcttcgccgccgatgcgcataccgtgatgtgtcgatctcgttcccgagctccgcttaacgcctgtttaagcggggcgaagctaccctgcgcggcgggattgccggaacgagcggatgtcagtcgtcgagaatgcgccagatcgaacgcctcccgaggcggcgcgttctgtcgatgatacgcgcctgctgccgatcctcagcgtggcgacgctgctcctgtcggcgctgctgctgttcctgatccagccgatgtttgcgaaaatggtgctgccgaagctcggcggtgcgccctcggtctggtcggtggcgatggtgttcttccaggccgtgctgcttgccggctatgcctatgcccatctgctcggccgcttgttcgggcggcagcgcgcggggctggttcatctgctcctgctcgccgtcacggcgatgaccttgccgatcgcgatcgcgccgaattggggggcgccgccggcagatggaacggcgctctggctgttcgggctgttcgctgcgtcgatcggcctgccgttcttcacgctgtcggccagcgcacccttgctgcagagctggttcgccgcgagcggccatcgcgaggccagcaatccctacgtgctctatgccgcgtcgaatctcggctcgttcgcggccctgtttgcctatcccgtcgtcgtcgagccgctgctgacgctgaaaatgcaggcgggcgcttggtcggtcggcttcgcggtcttcgcgctcctcgtcacggcagtcgccttcgtcctgggacgaggcaatggcgtgacgggcgcggcgccgacgccgcagacgtcgatcgtcagcgcaaccgaccggctgcgctggatcgcgcttgcggctattccatccgggctggtcatcgcggtgaccgcgcatctgacgaccgacgtcgcggcaaccccgtttctgtgggtcattccgctggcgctctatctgttcaccttcgttgtcgtgttccgcgatcggccgtggatcagccacgcgaccgtggcgtggctcgttccgttcgccgtggccccacttgcgatcagtctcgtgggcgccaaggtgttctggctgacgacgatcgcgctccacctcgtcgtgttcacgctgctgacgctgctctgccatggcgaactctacgcccggcgcccgcacccgcaacgcctgacggagttcttcctgtgcacctcattcgggggcgtgctgggcggcgccttcgccggactgctggcgccgaagattttttccggcaactacgaatatccgatcctgatcgcgctcgcgctgctggcactgccgggcatgttcgcaggcggtgcgcgccgggcgctgacgaaggcttcgccatggctggcgctggcgatcgcgctcgccatggtctggtatgtcaccaaactgcagctgccggcctcgctggagtttccgttcaaggccctgttgatcctgctcacggcctgcatgctcttcctgcgacaacggccggtgtcattcgccggattggcgatcacgggcctgatgctgacgacgttctggcgtcctggcatggccccgatcgagaccgcgcgcagcttcttcggtgtccataccgtggtcgacctctcggacggcagcgcgcggctgctgttccacggcaacacgatgcatggcgcagagcggttgcgtaacgaggatggcacgccggtcgcgggagcgcccgagcctcagagctactactatccgggcggcccgctggccgaagggatcgcggcggcacgcggcgccaacgacaggttcaagaacggcttcgaacgggttgcggtcgtcggcctcggcaccggctcgctcgcatgctacctgcgcggcgaagaggagtggagtttcttcgagatcgatcccgaggtgatcaggatcgcgagcaatcccgcattcttcacgttcctctcgcgctgcgcacccaaggccgacctcgtgctcggcgatgcgcgtctcacgctgcaggcctcacccgagcgctacgacctgatcgtgctggacgccttctcgtccgacggcattcccgtccacctgctgacccgtgaagcgatcgccggctatctgtcgaagctgacgccgcacggcgtcattctggtgcatatctccaaccgccatctcgatctggcgccgatcatggcgaatgtcgcgcagtcccaggggttgatcgcactgttcaaggaagggcatcccacgggcgacgtcatgaccacgctcaggacggcgtcccgggtggtgatgcttgcgcgcacggctgaggatgccggcgcggcggcacagcattggatcgccatgtcgccggacccggccagcgcactctggacggacgactactcgaacctgcttggccccatgctgcgagcgaagttcggctcctgagcccgcagacgatgcgcgccggccatcttggctccgttcacgttgacgccggcggcctgctttcctgcctagagcctattccgttccgattgaatcggaacgaggctctacagcatgatgaagttagcttgagatggagcggcgtcgaaggtgcacctctccccgacgaggagaggtggaccgagatcgcgccaagccgattcaaccaaaactcatcgcgccttagattgttgttttgacgcgttttcttcacgcgaaccggtatccacttcgctcgaaaacgctccagagcatgatccggaaatcggcgccccgtgcgcggggcgccgatagatgggacgaggccgtccggcctgcccggtcacgatgggccggtgcaggccttcggtgcgttgcgccgtggcggtcagaaccgctcggcgtcttcgttcagcgtcagcgcctcgacgccttcttcgcgaaccgcctggaggctgcgcggatcgaggtcgagcgcacgcaggatcgtcggcgcgatctgggtggtgaaggtggtctcctcgttcgtcctcgcatgcttgatgcggggcgaggagaccagcagcaggacattgcgatcgtccttggagaagccgccatgctcggcaagcttgctgccgccggtgcagatgacgccatgatcggtgatggcgatgaagtccggcacccggctgttgtggaacggatcctcatagagcttggtcagttcatcgcgatcgagcagcttctggatatgcaggtcggcagcatgggccagaatgtaggccttggcgtcggcatagtaggggttgccggtcgccggattggtcgcctgttgcagttccggcgacagccagaccagcgccgcgtcatcgcagatctcgaagccgttggcgccgaaaccgggcgccttgctgtacagcgagtcggagatcgccacgcggtccgcgaggttgatcggcgactggccatgcttggcgctgataatgatcagcgtcgaatcgtagaggttctgcgccttgagttcgttgatgaacttgccgagcgcatcgtccacgaactggaattgctgcgtgagcgcattgccgggcgtcgccttggcgtcggcatagccgccgaccagcgacttgtcggtatcggcgttgccggccttcgcaagcttctggccgacgctgacggcctggaagttcatgccgaagatcgcggggacgccttgatgctgcgttcgcgtgccgttgtagccgtcgatccagttcaacaccgcctgcaccttcagcgagtcgtatgaacggacgccgacaaagctcttggtgtagtcgtcgccaggcttggcgcccttgtcgatcgtgtcctgcgagttgatctcgggcgtgaacagctcgtcgaggcccttgccggatgggcccgccagatcctcataggccggatgcttgtcggaccacgccgtgcgcctgccggcctgcttgatgacctcgaagatcgtgttggtgcgcacgtattcgtgcggatagaccgggacgcactggccgttcaccagcttgcgctgcatgtgatccggatcgagctgcgtatggacctgaccgagcgtgccgccggcggtgtagtcggcaaccagcccgctggaataatcgtaggtcttgtcgagtgcctcgaagttggtgatttcggtgcctgccggcttcacgcaaccggggtccgcgagattttggctggtgtagaaggccttggccggatactcggtgcgatcatagctgtcgtcatagaacaggccgccgcccttcggcgtggcgccagtgacctgcgcgagcatgcccggataactatcggacggcgcggtggtgtaggcgttcggatagacgacgcccttgccggtgagctgggcgaagttgccgccggggcggctttcgacccaacgcttcaaatcgacggcgtgcatgccgtcgacactgatcagcaggacatgcttgtagccatgtcgccgcgaatgcccatcgtcatcgtccgcatgcgccactgcgacgccgcaagcgagcatggtcgccgcgatcgcggcagtcgacaagaaattgttatgaaaacaacgcatgaaattgcccctctctgtttccgttgaattggaattgccagcgctggccgcgacaacttgtcgccgtcaattgacggcgggatgacgctttcgtgcgagttcgatgactaaggcgggatgagttttggttgaatcggcttggcgcggtctcgcttcacctctccccagtggggagaggtcggattgcgcagcaatccgggtgagggctcttgctctctcgatagaccgcagcccctcacccgatttgctgcgcaaatcgacctctcccaagggagaggtgaactttcgacgccgttccagctcaacctattctcatcgggccttaaggcggagctgatcggcatccaggggcgggcgatgcgctgtcgccgcgcaacgaatggttcttgccgttcactcgccgagttgtgctgggctgcgggtgtcaccctgccgaagcgccgtcggttggaactgcaagcgatgcttgaagcaggacggcgagcacctctgcaggtttcgcgttggcaaaggccggcaggagggaggagtccatcggccggatgaagtccttgcggctgtcctgatatcggatccacagtccggcaaagtaaatggccggagcgagcagcaacagcggctcacaaggttcgtcatcgtcactgtcgaatgagatcgcgcgacgcacggcgggtgcctgaagcgctttgggaaagttggttacgtatggtccctcgttcagttcggccaatcgatagccgccctggtcggtgaagacggcatgagctgcggcgatcggctcaagagcattcttgtcatagatgagaaaccgccagccgaggatggttgctacggaactgagtgccggcagctcatttgcggctggagccttggccgtgcaccggtcaggccccgccagacggcgcaacgcgctcaacggcagcaacgccatgcgatgcggtgcgcaaagctgcaggtcttcgggatgattgcgatgcgcgaagttgagcttgggcgtcgcaaagccccgcgtgcgcgcccgtctggccatgccggcaaggacggcgtcgcgggcatcgtcgggaaggtcagctgccggaatcgtcatgccgttgccctcctggtgtagtatgtgtccgtccaggtgccgcagttgacatagccgcgcggaaattgcgcggcgtcgatatccgagaggccccaccaagggtccgcaatcgccaggccgtagttatcttgcgcgggcacgccgaccgccgcggagtaacccttgatcgtgaccaggtgggctccgccgccattccagacgatgcgcacgcatagcgggcgcctgcctccgatctcttcctcggtctctcgcaaggacgcggaacggcgcgccgtccatttcctgaaatggccgacgcggaacagcgaggacatcaagtagccgtagacattgcaggcgtccttgtcgcccgcgcagcaatcacttcggcccagctgtccgttcgcaatgtcgcattgggtcaccctgctggcgggacgataaaaatgggcgacgctggccgcgacggcggcccagcaccagttggtcttttcctggtattcgttcttgaagtcgagcaggcgccacctcgatcgcctgaacgggggcagtttgatcgggacgcatgtcgcgttcacgagtgaagccgtttggtctgctgccggtgtcacgatcgtttcccccgcgtcttcttggaggccgaacgtccgggcggcaggacgagcgtcccggccttgccaggctcacgcttggcctcggccgacaccgccttgaatgtcggacagtccttgaggagctcgaacgcctggtgggcaatcacctttcccgcgtgggtatcgctcgggtagtggacgcctgccacctcgcggttgcgcccgatgcgatcggccaatgcgacgagcatccgcctggtgtgtcggggatggatctccgcaagcgccagggcgatcaggtggctttccagcgaatgcgcgctcggaaacgaggcgtgccccggcgaattgatcaagggaacgagagcgggacagacctgttgcggccgagcccgattgaaccggagcttgaagtcgatcgccaccatctgggcaacccggatcgccatctcgatgatcttgagcgagttcggatgcgaccacgccgacatcatcaggacttcggcaaaatagccgcgcagtcgggcattctgatcgagaatttcaccgatcaggcgagggcgctcgtcgcgcgccattgcagccaactgatcgatctcggtaaaaatatccgcatgacgatggggcggatccggagctcgaatggagcgacgccaattggtctgcccgaactcagccagcgcgatcacgccaaacaggtcgggctcccaccccgaccaggggaaaaccaccttgaaatcgaggtccttctcgcagatttcaccgcccagcggatcgaagatcaggaaaggtgcgccctgtgctggtggcgaacccatataggctccgcccgcgccataactttgaccgccgcctcccccgccatctccgccgccatcgccaccaccgtctccgccaccgtccccgccgccatcaaatacatgaaactgcatcgcgacctcccagctccaataatcatcttgtcaatgagacgctccaaattcagacaggaagtccggcggcttccagccgttgtacgtaaagtgaagcttgctccgccttgaaagggcaacgcggcgcgtaatcagacaccgtgaaatgcggcagaaccgatcgatgatgtgttgccaacaacgtggcatcctcatgcctgccgaccgccacgaggcttgccgcggcgatccggatcgcgtttccgtatcgcggattgaggctgagtgcctttcgcgaccagcgaatggcctcctcataggtaccgttcaaataatgattctggccgagccgcgagtaactggtgaaggcttgttgatccagcggggacagccgaatggcgcgttcggctcgttcgattcctgacgtcgcttggccgatgaagccgtatgttgcgctgctgaacatccatgcccagggattgttcggcgatgcggcaagcgcgcggtcaaagcagtccagggccgtgtcatagtcgaaatgaaacgcactgcgcgcgtgtccctgcagtgaaagggccagcgcgtcggatggatctcgttcgattgcgcaattggatagccggatgatctcggcgatctcggcgttgggatcggtcgaccggccctcggcgatgttcagcatgtgccagcgcgccgaaaacgcatagggcgccgcatagccgtcgtcctcttcgcgcgcccgctccagcagcgtccgcgccatcgaaaagctggcgaagtccagcttgtagagcagatcaagcgcgcgcagaaagtaatcgtacgagttcagattgtgcgggcgcttccgcagcgcgcgcttcacctcggcctggtgcacatgcgtcgagatgcgacccacgatcatgagggcgatttcgtcctgcacgccgaagatatgctcgatatcggtttcgtacttttccgcccatatgaccgatgccgtcgacaagtcaccgagctcgacagcgagccggattcgaccgccggcccggcggatgctgccactgagcaaataccgcacaccaagtcgttcgccggccactgttccgtaatcgacggcgcggcggtcgatcatcatggtcgatccgcgggcaacgaccaggagatgcttgatattgctgagcgtcgcgatgatgtcgtcgacgaatccctcggcaaaataattatcgccggggtcgtctgaaagactgacgagcggcaggacggcgattgagggcagctttgcgcgtctggagggcgggctcgcgaaccccactgccgcgccgcgatccacccccggcaatcgcagcgagaacgcggggacagctcgggtcaggttcttcagccgaaggtcgccgagactgtcgaatttcagatctccggcgccatcaagattgtcgagcacggccgacgacaccacgatcccgtctgccggcgccgtcgtctgtagacgcgcggcgatattgaccgcgcttccgtagacgtcgtcgagatcgaagatcacgggctcccaatggatgccaatgcgaaatgcgatacggcgctcgggagagtgctggctctctcgagccaggatttcctgctgcagctcgatcgcgcattcgacggcatccagcgggctctcgaagaccgcgagaaatccgtcgccggtgttcttcacgatttcaccgcgatgagagacgatggtcggatcggtgacttcgacccggagcgtgcgatagcgttgatgggtttcgagctcggccgcttccatcagtcgggtgtagccaactacgtcagcagcaaggacagcgcgacaagcccgctcaaagggaggcatcacttgagtggacaacacggggtcagtctgcactgccatgcccgtcataccgtcgcgccataaccttcgatgtacgttagcatgcggaaacgaccctgtcgccatcgggccgggacccgtcgatgagcgccgaccgccacaaagatgccggcagaaggccgttattccgcagcccggcgcggatgatggccgacattcaatgcgatgtccgggtcccggcgatccgcagcgccggccgcgcgaccgcgcaattcatgctggaccgggccacgtcgaagggctggagcttgcaggcgcagggctctatgacaagcacgagggggaacgcacatgcccaacatgtctcgccggccattgctgcggctcgtgctcggcgcggctgcgctgccgctggcatcggggcgcgcgcgcgccgaaaccatggcacgcccgatcacgatgatcgtgccgttcgccgccggcgggccgaccgatgtgctggcgcggatcctcgccgaatatatgcgtaatgcggtcggccatcccgtcatcatcgagaatgtcaccggcgcctcgggcaccgtcgcggggctgcgcgcctcgcgcgcggcgcctgacggctccacgatcacgatcgggcattggggtacgcattgcctcaacggtgcgatctatcagctgcaatacgacgtgcgcgaattcgctcccgttgcgctgatcgcgagtggaccgcagctgatcatcggccggcccgatctgccggcgaagaatctgaaagagctgatcgcctggctcaaggccaatggtgacaaggcgacagcaggtaccgcgggcccgggttcgggcgcgcatgtcgcaggcgtgttcttccagcagctgacggctacgaacttctccttcgtgccgtatcgcggcgccggccccgcgctgaacgatctgatggccgggcatatcgacatcatgttcgaccaggcctcgaactcgctgccgcaggtgaagagcgggaccgtgaaagccttcgcggtgacggcatcgtcgcgcctcgcatcggcagacgatattccgaccgtcgatgaagccggattgccgggtctctatatcgcctgttggcacggcatctgggcgccgaagggcacgcccgccgatatcgtgtcgacgctgtcgaaggcggtgatgtcggcactcgcggagcccgccgtccggcaacgcttcgccgaactcgggcaggagattccgccgccggacaaacagggctccgccgcgctgcgcgaccatcaagccgccgaggtcgagaaatggtggccgatcgtcaagtcggccaacatcaaggcggaataggctccgtcgcgacgttccatcacgctcaagagcggaccgcgaacagcggtatcccttgccgtttcgaacttcgatgtcgtccgaaggtcaggcgctgctgccggacagcgtcgtgaagcagatcgggaagacctgggcctccgagctcgagggctcccgtcttgcctcgcgagagcacgcgatggcttgggccggcgtcaatcgacgccgacctttttcgttcgggctcggccggttcggcgataaccaaggggtgtttgaaccaagtcactgactttaaaagggtttctgagcataattcgcttcgtcagccccccttgaacggtcgatctctgcacttatatgtacgatcgaacatataaagcgaacgatgatcgataccagcaaagcagcaatcgcgcccatgtcccggcccaagggacgccgcagcaaggacatgccggatggccgccaggcgctgctgatcgcggcgaccgaggcctttgcggcccagggcttcgacggcgccgacctgcgcagcgtcgcggcggcggccggcgtcgcgccgaatctcgtgcgcgtccatttcggcaacaaggccgcgctgtgggacgcctgcctcgatcgcatcgtcgtgctcgcgctgcctgtgatgaccgaagtgcatgcgatcgcgaccgataccagccgatcgctcggtgaccggcttcgcgctctcatcatcaccatcgccacgttctatgcggcgcatccgcagctgaggaatttcgtggttcgccatgctgcggagacgcctgagcgctccacgcgggtgaccgagaagctgctgcgtccggcctatgagagtgcgcgcgagctgtttcaggccggcatcgcggcgggcatcatccgcagcagccatccggcgctgttcttcgcgttgctcaatgccgcactcaaccagccgccgacttttccgacgctgctcggccggctcgcgcccgagatcgatcccgagactgcatgggcgcaactgctcgacaccacgatcgcaacgcttctgcaccttccgccgtcgcacgacggcgaacccgccgccggcaacggccgcaaaccgcagtcgtgacctcggtctcgacgacccttcaaccgccagtgagagagtgatccatgaaacttcgccttgccctcgtgttcgtcgccgcaacgatggcgccagccatgacgcccgccttggctcagtccgacccgaacgaatcgatgcagcgccaggcctgcatgggcgacgcgatgcggctctgcggcgcctacatcccgaaccgcagcaagatcagggattgcatggcggcgcaggtcgagcagctcagcccgtcatgccgcgcggtgttcgatgcatccgttcaggccgagcgagcgccgtcggggaggcgttgaccagcgtcgtctggctgacagtcggcgcgaatgccacagcggcggatgcaattgagagcatccgcagctatggcagggctggcaatttgcaaaacttgcattggaaatcattgccccgctcgtcggtgcgaatctcgaaatcctccgagacgcgctcgattcgattgcggaaggggccgatctcgcaaagctcggcgcaccccgtgcgcgggcacttcgggcagcgcaaaatctcggtccagcgcgacttggccatgacatgatcctgcgaacgcgggcgtcattgtcagtgagccggtccggtgaaatttgatccagctcaaatttggttcgcggagccccgggtcttctcgagcctccagttgcttgagcttcgtcggcgcacatttgcagttgtgttcgtcagcgctccgcagcttgggagagcgtagccaaactgccatctgtttcaaatccgtgaaaacacccagccctgttaacctttggttaaccatgcgggtcgattgttaaccattcgacaagacaaccgagtcaggggcgatggacgcaactcaacaggtcgcacgtcagcaggtccgcatgcgcgggcgctcctatgttgcgttcgttttctcgccggtcgtgccggtcgtgtcgtggctcgccgagatcgacgtgacgctggcgaaatcgcccggcttcttcgccggcaagcccgtcgtgctcgacctctcagcggtcgacctcagccaggccgcgatcgcgcatctgatcggcagcctcgccgaacgcaacatccgcatcctcggcatcgaaggggtcgacgaatcgaagctcggcgccaacatgccgccgctgctgaccggcggccgcgcctgcgcgatcacccatgtcgagccgaaggcgccgccggcgcaggaaaagaacaaagacaaggacaagggcaagctgccgtcgctgctgctggagagcccggtccgttccggccagtcgatcgtgtttgccgaaggcgacgtcaccgtgctcggctcggtcggctccggcgccgagatcgtcgccggcggctcgatccatgtctacggcacgctacgcggccgcgcgatggccggcatcaacggcaattcggcggcgcggatcttctgccagaggatcgaggccgaactgctcgccatcgacggctactaccagaccgcggatgacatttccgacagcctgcgcaaccggcccgcccaggcgtggctcgagggcgaaatgctgcgcatcacaccattgaactgaccgactgactacaaggagagagagaatggccaaggttttggtcgtgacgtctgggaagggcggggtcggcaagacgacctcaaccgccgcgcttggcgcggcgctcgcgcaaatgggccagaatgtcgtcgtcatcgatttcgacgtcggcctgcgcaacctcgacctcgtgatgggcgcggagcggcgggtcgtgttcgacctgatcaacgtcgtgcagggagttgcaaaactgccgcaggccctgatccgcgacaagcggctggaaaatctctggctgctgccggcgtcacagacccgcgacaaggacgcgctgaccgaagagggcgtcaagcgcgtgatcgccgacctcaagaccaagttcgactggatcctgtgcgacagcccggccggcatcgaacgcggcgccacgctcgcgatgcgctacgccgacgaggccatcatcgtcaccaacccggaagtgtcgtcggtgcgcgactccgaccgcatcatcggcatgctggattccaagacggtccgcgccgagcgcggcgagcgggtcgagaagcatctgctggtcacccgctatgacgccagccgcgccgcgcgcggcgagatgctgtcgatcgacgatatcctggagatccttgcgacgccgctgctcggcatcgttccggaaagccaggacgtgctgcgcgcctccaatgtcggctgcccggtcacgctgaacgccgcaggcagcgcgccggcgcgggcctataccgacgcggtgcgacgcctgatgggcgagcaagtcgagatgatcgtgccggtcgagcgcaaggggctgatggaccggctgctgcgacggagggcggcatgatgaacgtaatgcggctgttcggcggccgcgctgcatcagcgcccgtcgcgcgggagcggttgcagatcctgctgtcgcatgagcgcggccggagcggtgcgcccgatcttctggaaacgctccgttcggaaatcctgagcgtggtgtccaagcatatcgacgtcgatcccgacaaggtcgtggtccggatggatcgcggcaagttcgtctcgatgctcgaggtcgacatcgaggttcccaacggcgtgcaacgatcaaagatggtggcggccacatgacggcagacagcgacagtcacattgcctggcagcgcgcgcagctgaagaagctgcgtgcggcgctgaagcagatcgaggtcgatcaactcggcaaggccaattgcggccgcgcgacccagatgacgatcgacgaattgcagcgcaagatcggtgaatcgggccgctgcatcgccgagtacgagcgccgcacccgccgcccgctggcgaccgatctcggcagcctcgccagcgtcagctggacccactggaacgccaacctgccgatggccaaatcgccgcgccatcgggcgtgacgaaccgttagcgcagccaactacagcaaaaacgccagcgccgcttcgcactggtcctcgaccttgagcgtcagcagctcgtcggcgcgggtgcggccgagattgacggcggcgatcggcaggccgcgctgctccgccatccggacgaagcggaagccggaatagaccatcagcgaggagccgacgacgagcaacgcgtcggcctgctcgagatgggattgtgccgacgcgaccgtgtcgcgcggcacgttctcgccgaagaacaccacgtcgggtttcagcacgccgccgcagacctcgcaggccggcaccacgaatgacgaaaaatcctgctcgagatcggcgtcgccatcgggcgcatcagtggcatcgagcgcgagccaggcagggttcagccgtgcaagttcgccctgaaaccgctcgcgcggcatcgtggcgccgcagccgaggcagcgcaccacgtcgagccggccgtgcaggtcgatcacgcgccggctgcccgcagcctggtgcaggcggtcgacattctgggtcaagagcagctcgcaacgcccttgttgctccaggtttgccagcgcgcgatgcgcaccattcggcatcgcccggccgaaccgccgccagccgaccatgctgcgcgcccaatagcgctgccgcgtcgtcgcctcccccagaaatgcctggatcgtgaccggccgcgtccgcttccagttgccgtcgctgtcgcgataatcgggaatgccggaattggtgctgcagccggccccggtcaggacgaacaggcgctggtggccggcgacgaaatcctcgagggcggggtggggcatgcgggctcatctagggtggcgcgcacggctacgccagatctggggtttgtcgcgcgcaggccgttcacccggcctctgcgtccttagcatggcctcggtgaaatggtgttgccgcgctggcctggcggcgttccggccttaccgtgtcggtagaacgaagacctggcccggatagatcaggttcggattgcggatctgctgcgagttggcgcgatagatcaccgcgtagcgttgcccggtgcccaatgcacgttggctgatccgccacaggctgtcgccgcgggtcacggtggtcgtggtgatcttcggcacgatcaccgtggacggcgagctcgcttcagaagcggtggtggctgccgtcgcgagctgcggcgtgaccgtgcctgcaccggtggacgacgctgccgacgccgggatcgatgccgtcgtcgtcgtgtccggaacattgaacggcacctcggcacgcgcgcggaccttgccggaaccggggtcgacctcgtcaagccggatccgatagtcgccgggcgtcacgcccttgttgatcgtgaccgagaggcgtcccgtctggtcggccgtggcagacgtgatcgggctgccgttgaggtagagcctgacggtcgcgccgggagcggcctgaccgctcacatggagtttgccgcccggttcggtctcgaccgcctcaatagccatcttccccgcagccgatgccgtggcgccgggttgcgacagcacccggaccggcgtgtccggggtcatcagcgccaccatcggacgctcccttgccgcggcctcgagcgccaccgccacgctctgcttcgaggtcacctgcttgccgtcacgcatgatgcgcagggtcaggtcgtggtttcccggcggcagcgggcgcgggaccatgacgaactggccggatttgtccgccaccgcgcgatcgtacacctcgccgttgcgcagcaattccaccgtcgcatcaggcagcgcccggccggcgacgacggtctcgccggtcggctcgacgttgacgacgtcgaactccggcaacgtgttgccatcaggtgccggcgtcggtcctgcgagcgcgtcggccagggctgcggtgtcggtctgcaccttcgccaacgccgcctggcgctggtctcgtgcgggagcccccggcgcggatggcgccgccgccatcaaaggcgtgcccgtgcccggaatttgctggctttggcggacgccaaacacgaaaacggccgtgccggcggcggcaagtgccaccaacgctatgaccaatttcatcgccgtggcgttcatgagccgtcacccgcggatgaacctcccccgccagcaaccccgtggagattcctgggaagactgcgctcgtttgcacgccccatcaagtcggatgaaaggattactcttctcggtgagccgggcggatcctgcagcttacctccgcttcgtgccagggcgcgatttcggcgctcgacgtgacggataagaccggagccgatgacgcgcgtcagcatgggcggccgctggtgcaggctcaaaactccagcgccgcattgtccaccacctccttcatcacgaagaaggtccgggtctgccgcacgccgggcagtgcgatcagctggtcgccatggatgcggttgaaatcctccatgtcgccggcgcggatcttgaggaagtagtcgaagtcaccggcgacgaggtggcagtcgagcacgcatttcagtttcgccaccgcctgctcgaagctggcaaagctttccggcgtcgagcggtcgagcacgacgccgaccatgaccagcgtgcctttgccgagcttgcgcggcgccaccatggcgcgcacgctgctgacataaccctcgtcgaacagcgcctgcgtgcggcgatggcaggtcgcggggctgacgccgacctgatcggccagctcggcattgctgagtcggccattcttctgcagcaatcgcaacatcttgaggtcgatgcggtcgagctcggcgggcatggaagaatctctcatttttgtcggatatttcgagagaaatattagcatcggtgagaaattgcgcaatcttgggcgatttcacctgccgagttagagcgcacctttcgcgtcgagggtgataaagattgccgccgtttcggaccaccaaagaggacgccagcatgctggaaaaattcgcgcgctatccgctcaccttcgggccgaccgccatcgagaagctcgatcggctgtcaaagcatctcggcggcaaggtcgaactctatgccaagcgcgaggattgcaattccgggctcgcctacggcggcaacaagctgcgcaagctcgaatacatcatccccgacgcgatcgcctccaacgccgacacgctggtctcgatcggcggcgtgcagtcgaaccacacccgcatggttgcagcggtcgcagccaagatcggcatgaagtgccggctggtgcaggaaagctgggtgccgcacgaggatgcggtctatgaccgcgtcggcaacatcctgctttcgcgggtgatgggcgccgacgtccgcctggtcgacgaaggtttcgacatcggcatccgcaagagctgggagcaggcgatcgaggaggtgaaggcggccggcggcaagccctacgccattccggccggggcctccgtgcacaaatatggcgggctcggctatgtcggctttgccgaagaggtgcgcgcgcaggagcgccagctcggcgtcaagttcgactacatcgtcgtctgcacggtgaccggctcgacccatgccggcatgctggtcggcttcgccgccgatggccgcgcgcgcaacgtgatcggcatcgacggttcgttcacgcccgcgcagaccaaggcgcaggtgctgtcgatcgcgcagaacacggctgagctcgtcgagctcggccgcgacatcgtcaaggacgatgtcgtgctgatcgaggactacgcctatcccgcctatggcgtgccgtcggaagagaccaaggcggcgatccgtctcagcgcgcggctggaaggcatgatcaccgaccccgtctatgaggggaagtcgatgcagggcatgatcgacctggtgcagaagggcttcttcccggccggatccaaggtgctctatgcccatctcggcggcgccccggcgctcaacggctacgcctacgccttccgcaacggctgaggccggcggggcttctgatttcatggcttcgtagcccggattacgctgcgcttcaccggactacgcgctgcatttgcacgagtaaggtcggagtcatcttctcccgatattctgtccggaccgggcgagtcgggagaccatcgcgtgaggatgatgaatgcggccggccgggccatcgccgcgcttggccttggcatcgtcgccgtggggcattggttctggacctgccaggggcagggcgcggtgttgcgggcccgtctgctggggctgaatcacaccatcgagctgtacgccggcatcttcctgatcggcgtcggtgtccacgccctcgcatcccactactggttcagcgatccggatgagccggcgccgtcttcggttcgggagccgcaatagcgcgccgcctcgcggcaaagccgagacgtcggagacgaccccggctgccgtcgctctagctcgtcgcggagccttgaggtcagcaaggccacagctgaaaagcatccccagaacggcgagcggaaatcgctaggaatgtagcgcaaagtcgctggcgatgtgattcttaaccaattgtaaacaattaggttttgactcttaagctaagatattggattcgcagcaaaaatcgctaaatccagtttgacttttgcctgagaaaaccttacatactaaaaaagggggcggatttctccgccccccggtagtcgggcatattccgagcctcggctggagacgggtggcagccctctccatttctctgccgaagcgcaggtaaaacgacacgacttcctcgatcttctcccggcgtcgagctacgctggttggtgtcagagccacacacggccacccgagcgggtggccgtagtcgtttccggaataggattcgactgctcacagttaatcacgattcagccccgcatacaacgttcttgaatgtaccatccgcgcgttataccattcgaattagaacacaggaggaacatccgtggctgataccgcgctacagaacgctgagaagcggcgagacgagatcgcggccgccattaatcaattgcaagcacagatcgaagaaaaacgtaaggagttagagaggattaagacctttatcgcggactacgcggtgttccaatcatacccctcagagctaccgctcgaacttcagaaaactccctcgcccgcgccgcgcctgcggctactcaacccaccgcgccatatggttggggataaggcggaaaaggttctacttcaaaacggccgcccgatggcccgtgacgagttattcaaggcggtcacgcgggatgggatgacaatccaggggaaagaccccgagatggtgttcagtacgatgctctggcgcatgcaggatcggttcgtgcggctccggccgcacggctattggctgaccaggatgccgtgcgcggcggtcggttaccttccatctcctcctttatccgcgcccgcgcccgagcccgagcccgagaaacctcagccttggccgtggggtaagccgaagccagatacagcagattgatccgagcgcgttatggttaatggaatcttccatacctagccgctcaagcatcttgcactgtattcttgggcatgaacaagctgctcggaagagagatcgtgctcgaaccctccgcctcctgtgaggaggcagttccattcgcgatcgcgtgccacaggtttttcccgcgaggggccggcaactcgccagctactttgcatgtgttgttttcgatattttagcaatgcgcgcctgcgacctagggcaggagtatcagagctcatccgagccgccgcagcgtatgcaccgtgatctccgccgggcaattcagccgcaccggcgcgaggctggtgccggcgccggtcgacgtgtagccggcgagttcgccgaagcgccaggcgcccttgcccatccggcgcggcagccgcgcctccagcttgatcgcgacgccgccgggcaggcagagctggccgccatgggtatggccgctcagcatcaggtcgaagccggccgccgcagccgcgcgataggattccggggtgtgtgcgagcaggatcgagaacgcctcgcgcgggatcgccgcggcagcctttgcgatgtcgtcggtgcggtagaaatgcgcgtcgtcgatcccggcgagatggatcgtcgcgccgtcgcgcgtgatcggctcgtgctcgttgaacagcatccggatgcccatcgcctccagcgccggcgtcatgcggatgctgtcgtgattgccgaggatgccgtagagcggccgcttgatccgcgcgcagacgtctttcatcagcgcgaggctggtctcgaacgagccgaacgtcttgccgcgataatcgccggtcagcacgcagatgtcgcaagccagatagcgcacgatgtctgccagatgccgcatcgcgccctggctgatgtcggcgtggagatcgctgaggtgaaggatggtgaagccgtcgaaggccgccggcagccgcggcgacatcaccagattgcgccgcacctcgacccggtcggcattgcgccgcgcacggccatggaggccgaccagcttgagcgcagtcgtgacgacccacggcgccaggcgccagttctcgacattgaacaccagcgtgccctggccgatcagttgcttctcgtgcgcggcctcgagcccaagccggcgcacgacgtgatccgcgccgatccgctcgaccaatccctgcaatgccgtatcggccatcgtcccccgtgcggcgcgcgatgcgacgcgagccggcgcgacactatcatgcgcaatcccggcgcggataccgcttgcggctcagaccaccgggacgcgcctggcggcaaccgcggccggcgagatcacctcgatgtcgagcggcacctgccaacgcccggtgaagcggacctgcggcggcgcattgccgttgcgtccgccctgcagcacgaagccctcatagcccgagttcatcacctcattgcacttctgcacatagatcggaaagccgccgatatagggcatgaacacgcggggacggcccgggatgttggcgccgacataccaggagctgcaggtcgagcgcagtgagaccgtggagacgtcgttgacatgggcgacccaggcatcctcatcgtcgcggaccgcctcgatcgtgtcggcgccgatgtcgcgcatgtggccaaggcagtccgccagccagtcgacatgctgctcgatcgcctggatcatgctcgcgagcaccgacgggctgccgggaccggtgatcatgaacaggttcggaaaaccctccgaggcgaggccgagataggcgcgcgggccggcccgccatttctcggccagcgtctgcccgccgcggccggtgatcgcgatcttgtcgaacgaaccggtcatggcggcaaagccggtggcggagacgatcgcgtcgaatttgtattcggtgccgtcgaccacgatgccctcggtggtgaagcgctcgatcggcgtcgtcgacacgtcgaccagcttcacatgcggcagattgtaggtctcgaaatagttggtatcgacgcaaagccgcttgcagccgaacacgttgcgagggcacagcagctcggcggtggcgggatccttgacgatgccgcggatcttctcgcgcgcgaaatcggcgatggtgtcgttggcggccttctcgaacagcaggtcgccgaacgcgccgaggaagggcaggccgccgcgctgccaggcttcctcatacagccgctcgcgctcgtcctcgctcgcctgcaatgcgggttgggcgttgaactgaaaatagaagccggtcgggcgcgcacgcgctttcgcgcgcagctccggataatgcgccttggcttccctgagatattccggtgacaattgctcgttccatgccggaacagaccaggtcgcggtgcgctggaacacggtgagctcggaggcctgctgcgcgatgatcgggatcgactggatcgccgacgagccggtgccgatgacgccgacgcgcaggccggtgaaatcgacaccttcatgcggccattcgccggtgtgatagatcgggccgcgaaaatccgccatgccggtgaaggccggacggttcggcgccgacaggcagccgaccgccatgatgcagaattttgcgctcaccctgtcgccgcgatcggtctcgatcagccagctccctgcctgctcgtcgaaggtcgccgcgatgacgcgggtgttgaacacgatctggctgcgcaggtcgaagcggtcggcgacgtggttggcgtaagcgagaatttcgggctgcggagaatatttctccgaccagctccagtcctggtcgagctcctcggagaacgagaaggagtattgcaggctctcgacgtcgcaacgcgcgccgggatagcgattccagtaccaggtgccgccgacgccgccgcctgcctcatagacccgcgcggtgaagccgagcccgcgcagccgatgcagcatgtacatgccggcgaacccggcgccgatcaccacggcatcgaacgttccagtttcggcagggcgcgcagttgtgcgcgcggcgctctcctgagggctctgctgaatcatggcccgtctcttccctctgtcgtcgttatgtcttggccgcgcctcgttgggcgggcaatgcaaagattagggcgagcgcggcacggcccgcaagcgcatgcgtggccgggccgggtatggctcctatgccgcggggcgaagggctgcggtatccgggtgctgcctcattccaggcgctggaccctgcgcagcgacgggaacagtttcatccacagcataggcgagttgggagaagttgtgtgacgccacgaacagcagcagtggcggatggcgaaacaggtcggcagacgggacctcaggttgcgcggacatgcggcggggatggccgaactggcggcggtcgtcattctctgcgttctggacggcttttcgaatctcgtctgggctggtgcggtcggatatattgtggcgatcgacctcccgagagcgacaggctgtgaatatggtgcgcccccgaaagcgatcggcccccgacgttgaagccgtggttcggaccgatcgattcgatatggctgcgttgcaggaggtcgctggtgaaaaagtcttcgctcggggctgcgcttatcacgcggatggccgcgtggaggtcataaccatcgacgagacccgcgtggtcgcgcaggtgtccggtaccgaattctatcgctgcgagttggccggacgaggcaagagtttttccggtgtttgtacatgccaggcatttgccgattggggcttctgcaagcatctgacggcggttgccttgactgtcaacaacctggaaccgggtgcgtttgcccaggcctcgagccgacttggcaagcttcgtgaccatctgcgctcaaagggtgtcgatcgtcttgtcgagatggttctcgaactcgtccggcgcgatcccatgctgcttggggagctggagctatcggccgcgctcgacaccgccgacgatgccacgctggctgcacaactcaagaaagccatcacagacgtgacgcgggtccgtggcaccgtcgaatatcgcggaatgcgtgagtgggctcgtgaaattgaccgcgttcttgatcgcatctcggttctgctcgaacgcaggcgagcatcgcttgtcctcgaattgctcgaacatttctttgcgcgaatggatgaggccttggccaaggttgatgattccgatggcggtggaggagcttgctacgcgcgggcctgcgcaattcaccttgcggcttgcgagcagtcgaagcctgagcctatcgagttggcgaggacgctgttcaagcgcgaagtcgactccgactgggatttcttctttggcgcaagtgagacctattcagacgtcctcggcgcggccgggcttgcagaatatcgcagactcgcaaccgaggcatggcagaaggtgaaatccgggcgagggagacgaacggagattcggtccagcgcagaatatgcgctccgaaccatgatggagcgtttcgccgaacgagaccaggatattgatgggatcatcgctattcgagcgagtgatctatcaaccgcgcataggtatctcgacgtcgctcaggtgtgcctggaccacggaagggaacaggaggcgctgaaatgggccgaagaggggctttggaaattcgaggataagccagacagggatctggttttctttgcctgcagtctccttcagcgcaatggacgaggcgaagatgccaacggattgctctggaagcagttcgtcagggagcccagcgtagagctatatcagcgattgaaatccaccgccggcgatcgcgaggctcaggtcctcgtccgcgacaaggccctcgccgcactgaggggcagagccgaaaagtctcgccggcaagcggaatggggcatattcggcgtggccgacgttcttgttcgcgtgctgctggcagagggattgcttgcggacgcatgggtggctgtcagtgagcacggatgccgcgaaatcgtcatgaaagagctcgccgaggcgagcgaagcggctctccccgccgaggcatcgaaggcctacgcccggttggtggaacgcaaagttgcgatgggtggacagggcaattatgtcgacgcatgcgccatgatcaagcggatgagacggcttcacggagccgctcaacattcggtctacctcgccgatctcatgacgcgccataaggcgaagcgtaactttgctaaacttttggcgtccaaacaggcctcttgaggtcgtgcgatccaagaagattgcatactgtcgtccgatcgtcgcccgcaaagaaatagccatgaaactcggatggaagccacagaagtggctggaaaagaagagcaaatcaggttttcggggctatctggtcggcacggtggcattctatggacccgacaaccttcgcgccagtaaggtcgccgtcgcggtggtcaccgcggagggagcgcctcccttcgcattgcgcagatggttctctgaaaccggcgatgttcgccatgatccggcgatcatggaggagatcgcaactttccttcgagcggaggacgtgcgcacggttgcctcggtgccgacgatgatggggtgtccgcatgaggaggggattgactatccccaaggggaggtttgtccgcagtgtccctattgggccaaccgggaacgccccttgtcgcgttgagaggtgatcgggccgctcgacgacgacttagctactgcatcgtgggcgctggcaatatttcggaataatagaaaataccactgagttgcccgacgcgtcaagcgctttttcgggtgccggcggctgcctgctgctttgcatggggttgttttcgatattttgtcgcgggcccctcgcaatgaccacgaagagaacatgacgaggtcagatcagccctccgtcccacgcacgatccggatcagctcgtcgccatagtgctcgagcttcttgtcgccgatgccggcgatgttgcgcaggtcgcccagcgtgtccggacgcatcgcggcgatgccgtcgatggtcgaatcgtgcagcaccacataggccggcacgccgcgcgcccgcgcgatctccgaacgccaggcgcgcaacgccgcatgcagcgcggggtttgcgaccccgcccgggctgtcggctgcgggcacgagctcgccgcggcgcgacttgccgcgcaccgcgcggttgcgcgcgccttccggctgctcgcgcagcatcaccgcggtctcgcccttcagcacgccgcgggcgctgtcggtcagtttcagcgcgccgaaggcgtcgctgtcggcgcgcagatggcccatcgccaccagctgccgcagcaccgcgcgccactgcttctcgttgagctcgcggccgatgccgaacacggacaattggtcgtggttgaactgcttgacccgctcggtcagccgcccgaccagcacgtcgatcaggtgcatggcgccgaaacgctgcccggtgcgatagacgcaggacaacagcttctgcgcgagcaccttgccgtcgcgcacccgcggcggcgtcaggcagttgtcgcaattgccgcagctttgctcggtcctggtctcgccgaaatagccgagcagccgctgccgccggcaatgcaccgtctcggcgagtgcgaccagcgcgtcgagcttgccgatcgagacgcgcttgaaggcatccgagccggtggactcatcgatcatgcggcgctgctgcacgatgtcggagaggccgtaggccatccacgccgccgacggcttgccgtcgcggccggcgcgtccggtctcctggtaataggcctcgatgctcttcggcagatcgagatgcgcgacgaagcgcacgtcgggcttgtcgatgcccatgccgaacgcaaccgtggcgacgatcacgatgccgtcctcgttgaggaagcggtcctgatggcgggcacgcacaccggcatcgagcccggcatgatagggcagcgcggcaatgccggcctcgctgagcgccgccgcgacgtcctcgaccttggcgcgggacaggcaatagaccacgccggcgtcgccggcatggcgttccctgataaagttcttcagctgcgtggtcgcattctgcttgtcgacgatctcgtagcggatattgggccggtcgaagcttgcgacgaactccggcgcgtcggtgagtgacagccgctcggcgatctccttccgcgtcattgcgtccgcggtcgcggtcagcgcgatgcgcggcaccttggggaagcgctcggcgagcgccgacaggccaatatattccgggcggaagtcgtggccccattgcgacacgcaatgcgcctcgtcgatcgcgaacagcgcgatctgcgcctggccgagcagattgaggcagcgcggcgtcagcagccgttccggcgcgacatagagcagatcgagatcgcccgcgatcagccgccgctcgacctcggaggcttcctcataggacagcgtcgagttcagcaccgcggcgttgacgccggcttcggtcaggcccgcgacctggtcgcgcatcaatgcgatcaggggcgacaccacgatgccgcagccgtcgcgcagcagcgacggcagctggtagcacagcgacttgccgccgccggtcggcatcagcaccaggcaattgccgcccgcggtgacgtggcggacgatcttctcctgcgcgccgcggaagcccgacaggccgaacacggaactgagcacggaccgcgcgtcgcgagacggatcggatgtgcgatcgggggcgggctgggcggtcatgatcccttgcgatttccccggaatttcctggggggcaacaggcggtgatcgaactcgtccgggcgaacgataccggaacgaaacgtgttaatacacgtcccgacagcaaactcaattcaggactcaattcaggttgggccggtcaacagcggatcatcgcaggcattgccgcgatcgctggcgcggcggcgagcgtcacagttccagcgccgttcggcgccagctccttgtccagcgtcactccgcgagcggtatcttcaggctgtcgcagttggtggcggcggtgccggcgtcattggctcgacattgtaggtcttcggcaagttgatcggctggtaggccggatccttctgcatccgctccagcaccgaggcgtggatggtcgcgccttccggtatcggccgcggctcgccccgcggcagatagaagccgaggaaggatttccgctccggccattccttccatttgtcgcgctttggaatccactccaggatctcccaggcggcagtcagcgaattgtgcagcggggccgttgcgctcggcggcacatagtcatggctgtgcggcggcaacggggtgccccaggcgagatgatcgatcagtgcttgatccatgtgcagcccagcggccttggcctgctcgagcatccagatcagcggaaacttcgacggcccgctctggtcctccggatagccgccgccgacgtcggaatgcacgccggcgaaccagacctggcggatgtcctgctcgaccgccgtcgaaggatcgaacggatcggagcggaacttctgcggctccttccagtagttgaggcgaaacatgcgcctgcgctcgtcgatcgagatcgcctggcggaagcgcctgacgctggaattggtgcgggtgaacagcagcgtctgcatgtcgaacaggaaatcgtcctgccgcggcacgatgatcgaggccaccgtgtcccagacgccgacgaactcgatgtcgatgttgcggccgccggcgatctggctgaaatgccaggcttccttcagcggcgcttcgtcgaacgtgccgtcggatttctgggcgtcggcgctggccttcttgtaggtgccgaaggcatagccagcaaggtcgagctggtcgaccggcaacagccccatcacatggacgaaggcggcgagcacgcgcaccgtgtaggcgccgcggctgaagccgaacatccagacccggtcgccgggctcccagagccggcatagaaactggtaggcgtcgagcgtatccttgtcgagaccggcgccgaaggctagcccgaacaggccccgcgcctcctgcttgaaacggccccagctgttctgcaggccgatcgtgccgaggcccggatgatagtagattcgctgccggccatccttgtcggcgacacgaaacagcttcaacacgttggaaatattggccccgatctcgttgccggtgccgtcgcacaaaatcacaatatccttcggcatccgtttccccgcggtcgccgtgaaagttcgcggttcctatgtagggcaggatgcgcggcagattcaatcttcaattgaagacggttctgtgtacgcggtgtgaacgccgccgatgccgcgccgcccgatccgatcgcggccattggcaccagctgcatagtcgcgcttggcgatatccgtagaattcaattgcaacaccttggaaaaggtgggaatctcaacttcaataattgctgtggtgcgttgacattttcctcccgttcgggacttcgctggtgcgcgcgatcattttgcctgcgggttgccgcagcttcctcatcatcgacaggaacggatcggcatgagccatcaagctctcgtgacgatcattctcgcgggactggtgatgggtgcgttcggactgttctggtgggtcggcagctattccgatcgcgtgtttgccaaccgattcagcacccgctttccggagaagacgctgagctacagcggcgaccagctcggggcactggtgcagtccgatctgcggatgaagtatgtcttcccgatcctgttcccgttcgatctcatcgtcatgctggcgctggcgggtgcgatgggcgccgcatcatcgcactggctcacccagatctatccgtccgcggcgtggctcggcctggtcgtgccggcggtgtatctgctcagcgacctgatcgaggattgtctgctggcatggctgctgctgcgcggcgatcctgatgcggcggcgcggtccgtctcggccctgaaggcgattacgacgatcaagctggtcagcgtcgcagcgtcgatcgcgctgatgctggctgcattcgtcgggtggctgttccacaccgaatcgctcgtcatctaggcgttgcggaccggacggcctattgatacgtcgcgacgatatccgacacggcgcgctcgagctgctgggcggtcgcgcattggcgcaccacggtgcagaaggtcgcgtagcgcggcatctcggaatcgccgaagccccagaccatccggccttcgggattgagccacaccagccgtttcgaccgctcgccgatccggcgcaggatgtcggcgcgcggatcgagattgttgctgcgggcgtcgccgagcacgatcacggtggtctgcggcgtgatcgcgctcatccaattgtcctcgaaatcggcgaaggaattgccgtagtcggacgagccgaagccgaccttggacatgatctccttcatcgcctcttccggcgagtttgattccaggatgtcgctgacctcgatcagatggccggagaacgcgaaggagcggacgtcgtcgacaacctcgtgcaggctgtggatcagcagcaggaagaagtccgagacgcgggcgaccgagcccgagacgtcgcacagcgccacgatcttcggccggtcgcgatgcttgcgcttccaagcggtgaggaacggcacgccgccccaggccgcattccggcgcagcgtgcggcggacgtcgagatggccgcggcgctgccgcttgcgcggcttggaatagcgctcgcgcagccgccgcgcgatctggcggatcagcgcgcgcatctgctcgacctgccgcggctcgatccgcgccagcggcgcattgcgcaggatctcgttgcgcaggttttcggcctcttcgcgaccgtagagcagcagcgcctgcgagaccgcatcgcgaaccgtgccgcgcaggccgttgagcgcgtcctgcagccgctcggcgagcgcaggattgcgcgtggtctgctcgtcgatgtcgtcgcgcaggcgctggatgcccatcgcatcgaggatgcgggtctggaagatgccgcgttgggtgaagtagcggatgtcgggcagcgaggcggcgccggaggcgttggcgatcgcagtcgagatcgcggcgcggtcctgcgacagcagcatctgcgccagtggcccgacatcggcgtcggccgctccgcccgaggtgtcgccatgctcgtctgccgacgggttggcgccggattcgccgttgtcgtcggtcctgttctgctcggcgctttcctgctgcggctcgggctggctgaagaacaggtcgaagcattcaccgagcgcgcgcttctcgtcctgggttttggcgagcgtcagcaggaacgtgtcgcgcaaaatgtcgcgatcgttgaagccgacctgggcgaccgcccgcatcgcatcgatgctttcggcgggcgagacccggaccccggctccccgcgccgcacgaaagaagcgatgcaggttctcgcgcatgttgatttagctaaagacgccctggcgcgacgccttggcgatgaaggacgagatctgcggcgtcgcggcctcgatgtcagcctcgtatttcagcagcacattgagcgtgtccttgacgatctcgtggtcgagctcgctggcttgcagcagcaccagcacgcgcgcccagtcgatcgcctcgctgaccgacggcagcttcttcaggtcaagcgagcggatctcgtggatgaagccgaccatctgcttgcgcagggtctgcgagatgccgggcacccggctctcgacgatgcgctcctccagcttctgctcggggaagccgatatgcagatgcaggcagcgccgcttcaaggcatcgccgagatcgcgttcgctgttcgaggtcaggatcacggtcggcggcgccaccgcggagacggtgccgagttcggggatcgtgacctggaagtcggagaggatttccaggagcagcgattcgaattcggcgtccgacttgtcgatctcgtcgatcagcagcacgcagccggcgggctgctccagcgcctgcagcagcggccgcggctcgacgaattccttggagaagaacacgtcgccgaaggtgtggagctggtcgagcgctgcggccagtgactgcgcgccgccgagcacctcgccgagcttgtccttcaggatctgggtgtagagcagctgcttggcgtatttccactcatacagcgccttggcctcgtcgaggccttcatagcactgcaggcggatcatcttcatgccgcgccaggcggcgatcgccttcgccagttcggtcttgccgacgccggcggggccttcgaccaggatcggcttctcgatctgctgcgacagatagaccgcggtcgcgatctgccggctcgcaatgtagccttgtgcggcgaggccgctttccacagcctcgatcgaggcggtgggcctggtgtcagccacgaggatcagctccgaatttgccttgaactcggacctgttctgcgctcgttgcgggcaaagcacaaggctcgtttggcccgcaacggcatggctccaaggttggagttagcgcatggttccggggtattccgccgagcgcaataccccggaagctgctcgccctcagctcgcgcagctcttgacgaaatccttgcgctgcgggccgacgatcttctggtcgatcgcctgcttcaggcagtcgagatgcgcctgcgccatgcagagctgcatctggtcgtgccgctcctgacccttcaacgccttcgccgcgctttggcaggccgcgcgcttcgcgccgggcacgggggctgccgccgtgctctcttgtgcgggagccgcagtcggcgccgctgcggggcttgaggttgactgcgcgaacgctgcggccgagaccagcagcgagccggccgagacaagggcgacgacaagacgtttcatgggatgtgcctccgcgggcatgatcaggagaattggacgtcggttttccggaacgtcctgctcagaccaggaaagggatcacattgcgatttcaccagcgcgccgtgaccccaggggagaccgagaactagaagccgtcgcctgaatgcggcgtgaataggcgcagaacccgcttcacctcagcgtgaggccggtcgccgcttcgagttcggagatcgcctgcgcggcgttcgcgaccttgatcgtggtcatgcccatctcgcgcgccggcttcagattgacgccgaggtcgtcgagatagacgcagttgccaggattcacctgcagcgtctccagcatcatccggtagatgcgtggatcgggcttgcggaggccgatcttcgcggactcgatgacatggtcgaacagcgccatcacctcggcgacatagagcgtgcgtccgctgtggctgccgatggcgttcgatggcagattgttggtgatgcagcccgtcttgaatttcgccttgatgcgcttcagcgcctcgaccatttccgggcgcaggtcgccggagagcagcggcagcacgtccttgccgcggacctcggcgccgagcgccttcgattccgtcgcgaacagcgcatcgaatgcgtcgatgccgatctcggcgcgttcgaacttggcccaggcgttgtcgagatggttggcggcgttggtgcggcggatgatgtcgacaggcaggccgcgctcggtctcatagcgcgcgaaggcctcgaacggcgaggtggtcaagacgccgccgaaatcccagatcactgcctcgatcatcacagtcctgcccgttgcaaagcggcggcttcgcctcgggtcgtccggccgcttggccgaagacagggaaacgcgccttgcgccttctttattggaattggcgccgatcaggcaagccgccagtttgcggcaaactccgccacgtggaacgggctcaccagaccatcggaaccaggcgatagcgcacgcgggtgagatattcggcgtagccgtcgagctcggcggtgagcatccgttcctccatcatggagcgcaggccgagcaacgccatcatcaccggcacgatggcgaggccccaccaggatcccagcagcagcggcgtgccgagataggtcagcaggccgctggcatagatcgggtggcgtacataggcgtaaggccccgtggtcaccgcggcgtgcccgcgctcgcgctgaattttcaccaccggcgcggcgtagctgttttcgcgataggtccggtagacgacgtagaacgacgccgcgatcatcgccgcgcccgcgcattgcagccagacggggacgagcgatgtctggtagcgcaccgcatccagcgccatcagcggcagccatgtcagccacaacagcggcatgatcgacgtgatgacgcgatcccagccggcctggccgcgcgcggtgcgccgctccgccagcagtcccggatcgtgcctcgcaagccaggcctcggtgatcagtccgccgatcgtgatctcggcgaggaatgcccagccgccggcccagcgcatggtgccggccgcgagaaacaggagtgttccgaggcctgcaaatgtgcaggccgcgcgctgcagattgatgcgagggggactactgttctggtccatgtctgtcctccgacgggcggcaacggccgcaccgccggatcgggcgggccgttgcatatccgggtagcggatcgacgcgcggctcggcgcgctcaaacggtcacggtcggcgggtccagtttcgcgcctgtccggaatagaccttgctcggcagcgcgcgggcggtcggatcgagcaggatcttcatcgcggtgttaagtctctcctccgagctcggcgagccgtcatggcgcatctgctgcggggcgccggggccctgcggcggcgccatgtaggcgggcgtggtcggcggcgcgggcgtggtggcgatcttcggacgggcgacaacggccgcttccagcgggcgccgtgcttcggcaacggctgaggctgttgattccgccggcggcggggcggcattgccggatccggattggcggggcgttcttgccatggcatcggctccataggttgggtgatgacgacgatttcaggattcggacgtcaggattggtcctcgtcggatgtggtgcgtttggcgatgatcgggttgcggtcgctgatcgcagcgagcaacgaggcgtggctcacgaccgacgacacgacgatctttccggagggctcgatccggcgaccgttctgctgttgttgctgtgggctcctggcagtggacttctgcatcatgtcggcctcctcgaggtggggtggggcccgacagcgccgggccccgagtttggcgatcagatgccgaaagcaccgaggacgcccggcagcgcctgcacgacgccgccgacgatgtcctgccaaccctgcgggttgaccgacccgttggtcgccacttcggcaatccgcttcggaccgcgctcgatgccctcacactggatcgggctacgcacgctgccgaaggtctcaaagtcgttccttgcgtacatgttcagctccttctttcggtttgaattgacggcaactacgggaggtaggcaccgaccggggcagccgtcgctggacgtcgcccaggggatcgctcatcgcgtcgatcccctggaccacgtgacgcaaattcgcgccacgttctgctctcctccggacgcagaggagcaatcgcgtcaatagacctgccactgccgcagcggcccgaccgccaccggcaccacgtcgctgacgtcgatcgtgtattgatagacttcgcgcgcctgggtcaggacctgcgtcggattgaagaagcggtaggtcacgtcgtggcaaatcgagtcggggcggcagatgacgctctggtcgacctcgacggtatcgagccgcagacccttcttggcggcgtcgatgaagatcttccgcgtgttgtaggcattcatcgcggaatagttcagcgcgcggtcctgcggagagagaccgacattgcggaactcgttgtagatccgctcgaggaagccttccgcgccgtccggccagggcagtggcccgaacagcgtgaacagatcccattggtagaaaccgcgccaatcggtcaccagcgtcggcacgacggtgccgttgagcagcttggtcgtgttggtgctgtcgacccagccggccatcgaaacccgcgcaacgccgccgggtggcgggaatgccggccgcggcgccggccgcgcgtcgtcggcgacggccgcggtcgcggtcactaccgtgcgggtcgtcgctggatcatcgtgcgagacttcctggtgccaaagcgccaggatcagcgcggcgaagaatccaagaccgaacacatcgagcggcttgatcgcgtagatcgggatcgaatcgatcgtcatcgtccaggtgatggcgtcggcatccgggaagttgttgccggcgccggccggtgtcgcggtctcgccttcggcctggttcagcagatagcgcgccatgatcgccggattgtagggcgccgacgtatcgccggagtgatcgcgatccggaccgaatgccggatcgccgcgtccgaccaggctgtcgcgccagttggcgatcgcctgcacgaagtaatcgagccgggcttccttgccgaaatcgtagaacagccggccgatcgggaaagcgagctgaccggtcgattcggccgcagcactctgcggacgcatgccgccgccgcagccgcagctcttctcgctggtccggaccgcgggcgcttcgtacatcggcagcgcctgcggcattgcgacgggaagcgcgttgctcggcatcagcgccggcaattgctgcggctgcagccaggtttgcggcatcatgccggccgtcggcatcgccatctgcggcatcatcatctgcggcatgacgatctgcggcgccggtgccggcatccagaccatgtcgccgcctgcatggggtgcgtgatacggatacggcgcgggcgccgcgatcggtgcggcgacgataccgtgatcaacggggacggccatggccgcaggtgctgccggcgcggcaggctgcgcctcgcttggcatgatcccggcgctgcttcgcaggaccgagccgtccggcccgaagatgcgcggagccgatggtgcagacattgctgatagatctcccatggaaccctctctggttgcagttggctgagcggcggatgatggttggacgaaagggcgcgcggacactccccagaagcggggaggcgcggccgtggcacccgacggcgtgacggcgtccgcctgctcgccaagcagggcggcgacagccgcgggaatgtcgagccgtccggcgagacagcgcgaggcgctgccgtcgttgcggcagggcgccgcgctttcgagcagcgcggcacggacggcttgcggatcggccttgcgtccgttctggcgcaggcatgagagcagcagcgcgacgacgccggtgacgatcggcgcggcgaagctcgttccggagcgcaggctgacattgcggaccggcgaggcgccggcaatgttctcgcccggcgccaggatgccgttctcgagataggcgtcgccgaaattgctgaacgccagcggattgccggccagatcgcacgcgccgaccgcgagcaccgacgagaggctgcccggcacctggacgcagcggcagccgtcattgccggcggcggcgacgatcagcttgccggcgcgctcgcaggcgcgcaccgcatcgaccaggatgcgatcggcctgtccggtcgtggattgctggccgctgctgatgttgatgacgtcggcgccgacggccagcgcctgattaatcgcgagcgccagggtgctttgcgacgagggcacgatctgcccggcggcattctcgcgatagatcgagaacacagtggcgctgcaattcggcgccacgccgagcaccgggctgccgggcgtgcccatcagcacgctggtgacatgcgtgccgtgctcggactggatcgtgggcgaggacggcgcgacgaactcgccgcccaaggcgacacgcgcctgcctgagcgagggatgattgagatcgacggggccgtcgatgatcgcgatcttcacctcggggtcgccacccgacgttctctgccacaaggcagtcagaccagcgatgtcggcaactggattcatgaaatcattcctgaccgatctgccgcgaattcacgcagtcgatcctcttccacaccaaattgctttcacgcagcgagcgaaaagagcggcatgtcgttgcgttggcgctgttgtggcaggtgtgcggcgagaggcctattcgccgcggtggatcagaaaggatcgagccggtgatgcggatcaatcgatccagaaatcgatccagaaccgatccacgagatcgatcgcgcggtacgaaagatcgatcgaaggatttagttgggatcgatcgcgcggcgcgccgtccatgcatgcgcaaggacgtgcggcaccctgccgccggagtgtcacgctcccgcggccggccgaacacggaattcaagatgctggggtcagtcgagctcgcggcggcgatcgagagccggcgccgaggatgcgatccacggcgcttcccgcacccgccgcatcgcctgcgcgcggcgcggcaggccgagcttctgcagcacgtgatggacgtgatgcttgacggtcgcaaggctgagactgagatcgcgtgcgatctccttgttcgacatgccctgtccgatcagcttgagaacctcgctttcgcggggcgtcagtccctggtccgtgtcgatcgtatccgtctggcggtccatgcaaaacagcgcgcgcagcaggccgccggaaatctcggcgctgcaggcaagccgccctgatgccacgtccgacagcgcgcgacagagctcgtcgaagctggcattccgggaaatgtaaccgctgaacccggcgcgaccgcagcgaaccacgtcgcgtcggtcttcgttgagaccgagcgcgaccagggcgatgtcggaatactcgctcgcaatcacgcgcacctcgtcgagatcgatgccctgtgtgacatcgatcagaatgacattcacgccaccggccccgagggtcgcgcgcaggccggcaagatcggaaaccgccgcctcgacggcaaattccgcgtggtttcggaaactcgaggtaagcccctcgctgaacagcctgatcggcgtgacgaccgcgatcctcatcattatcctcgaactcaacgaaatggcggatggaaaagccgtctgtctggtggtcgacggcaccggcatccagaaagtcatgaaggtaagtatgcggtatgctgccagaggttgtgttgttatctggccgaaattacggccctgatccacgcgggatcaagagatgcagttcacattcgtgcgtcgtgctgacagcgacgcacgatacgacgtgtcggacgttgcggcaaggcgacgatacgatacgtgtggacgccaaggtgctgcagcaaatctggcggcgagttcaacgccgtagtcatcgtcgactagatatttagataattgacgcgtgaaggcccggatgctctgtacaagaatgcgtgttctccgaagccgagggtgagcgacgcaatgccgcgcctcggtgctcaattccgaaacagatcgacggggttccatgacgagcttgattcgagcgacagcctttctgaccctgttgatggcaacgccggccttcgcgatcgtcggtggcggcgcgccgtcgaccgacggtgtcgcgcgcgcggtggtcaccatcgttggttcgcgcggcaatttctgcaccggtgcgctgatcgcgccgaaggtcgtgctgaccgcggcgcattgcgtccagcccggtgccgactacaagatcgtcgagtacggtgcggaccggcagcccaagctgcaggacgtcaagacggttgcgattcatcccggcttccggatgcaggcgatgaccgatcatgtcgcgaccgctgacgtggcgctgctgcagcttacggcaccggtcgcaggcaaggcgccggccgcgctcggcatgcccaacattccgatccaggtcggcggccgcttcaccgtcgcgggcgtcggcgtcaccgtgcgcggcgacggcaagagcggcggcagcattcgcgtcgccggactgatcgcgagcggcaagcccggcacgctgcagatccgtctcgtcgatccggtcggacaaggcgtgcgcgacgggctcggggcctgcaccggcgattccggcgcgcccgtgttcgaggacaagccgggcgggcccgtcatcgtcggcgtggtgagctggtccaccggtccgaacggcaccgccggctgcggcggcatcaccggcgtgacaccgctgacgctctatcgcgactggctgatgcagaccgcgctgcaatggggcgcgagcttctagcgcgttttcaattccgtcatcctgagtagcgcgttgcgcgtctcgaaggatgaacggccccactgcggccgattcacccttcgcggctcgctccgctcgcaccctaggatgacgaaacaaagagtgtgcagcgaagcctaatgccccaccgccttgttcgcggcggcgttgttcagcacgatcagtccgtcgacggcgacgccgagcttgctattgatcaggaacgggttgacgtcgatcgaggcgatgcggccgttggcgtcggccatcaaattggagagcccgaccagcgccttcaccgccgacggctcgtgcagcgcgggcttgccgcgatagcccttcatcttgacgccggccttggtcttgccgatcagctgctttgcctcggcggcatcgagcggtgcgccggccagcgcgacgtccttcatcagctcgatatcgacaccgccggtgccgaacagcaccaccgggcccatctcggcatcgagcgaggcgccgaccacgagctcgaggtcggccttgacctgctgcgcgatcaggatgccttcgagtttcggcttgcccttcagcttcttcacccgcgcggtgatgtcgttgaacgccttcttcacctcggccgcattggcgaggttcagcacgacgccgccgatgtcggacttgtgcaggatgtcggggctgaccaccttggcgaccaccgggaagccgatctgcttggcgatctttgcggcatcggccgcggtctgcgcgaccgcttccttcgagatcgggatgccgtaggccttgagcagctgcttggaggcgacctcgtcgagcgcggcagcgccgttggcggccttcagcgccttctccaacatcgcgcgcgccgacgccttcgagctcgacacgatgtcgggcacctccttgcgcaggccggcatattcgatcagcgacttgatcgcgccgaccgcgcggtcgaggccctgcaggacggcgatattgggcagcgatttgcgcagtcccttggtgaagtcggtgaagccgatcgacatcgcgctgatatagatcaccggcttgttggcgtggcccgccatctcgtcgacgatgcgcagattgcgctcgcgcagttcgtgcggcgccttgggcagctcggcatcgatgatgacgatgtcggtgtcgggatcgtcgatcatgatcttgatcgacttcatgtagacggacgggtcgaccaccgcggcgaagccggcgtcgagcgggttaccgacgatgctgccgggcccgagcatcttcgccagctgctcggacgcgttcgggctcagcggcgcgaagttcagcccggcggaatagaatgcgtcgatcaaaagtccgcgcttgcctccggagagcgacacggccgcaagccgattgcccttcggcggatcggcatggacgaagcactcggtggtttcgatcagttcatccagtccgcgcacccggatcacgccctcgcgggtcgagatcgcgtcgaatgtctcgatcgagccggccagcgcgccggtatgcgccatcgcggcggcgcggccgccttcggaggcgccgagcttcagcgcgatcaccggcttgcccgcggcgcgtgcggccttgcaggcgtcgcggaacacctttgtgttcctgacgccttcgagatagaccacgatgacgcggatgctcggatcggccgcgaaatagctcatcagatccggggtctcgagaccggattcattgccggtcgtgaccatgtagccgacgccgacgccgcgatcctccagcgcctggcggatcgccatcacgatggcgccggactggccggcgatcgcgaccgcgccctgctccatggtgacgatgcggtcgtcgatattggtgaacaaattctcgccggcgctgagattgccgaggcaattcggaccggtgactgcaagcccggtctccttgatcgcctgcttcagctcggccgcaaggcgctggctctcctcgtcctgcaattcgctgaaacccgaggtgacgatggttgccgaacgcgcgccggcggcggccgcgtcgcggattacctgcacggcaaagcgggccggcaccagcaccagcacgtggtcgggcttttcgggaaggctggcgaaatccttgtagcaggtgacgccccagatcatctcgcgcttggcgttgatcggatagaggccgccggcatatttgtacttgaccaggttgttccagatccgctcggcgtagttgccgggcttgtcggtggcgccgaccagcacgatgttgcgcgggtgcagcatcgcatggatgctcttgacgatgtcgctggcgtcagcaggcggcgcccatttgtgggacggatgagacgcggtgcgtgcgatagcttccatggagcctgcccttatccttgttctgcttgtttcctctggcccacggtgcgtcaccgcaggagatgatttttcattgtttttatggcgagggaaagggggtagcaactcacgctggcgcaagtcagggcgtcgcgcgcgatatcccggcaggcgaaattgatgtggatcaggaaccctgttcgatcaggggcgcgtgcaacagataacgctcgggccccgatgtcagtgcgtcgaacggccagcaggtcgacagcaccagttcatgttgatccgtgataggatcgataccggattgatcgaagcgaacgaccgcgctgcggtcggcccggtagcgaaacgtcttgccgtcgcttcgcgtgatgtcgatctcgtcgccgattgtgacatctttcagaaagcggaaatgggtgtcgcgatgcgcggagtagaccgcgacgccgcgctcgccggcgtcgacgctctgctcgacatgaccggggccgaacgccagcgcctggccgctgctgcccgccagcgcgatcgtggacacgtgcagccgcttcacctcgatcctggccacgggccaggtatcggcccagtgccatggcttcacgggcaggccggtttcgatgctctttgcaaaggcgcgctccagcagcacctgcgcgaccagcgccttggcgtggatatagctgccctggccgaacaggatcaggccgatgagggcgaaggtgagcggcaggatgaagcggcgcatcttcattttcctcgtcattgcttgcgccgctcgcgatgacggctgaggaagaagtgacgcgcgcggcccctgggggacgggtgggaaggccgcgcgcgctcttggaaaggaggaggtcggggggcacctgctcctttcatcggacgtcattggggtgacgtctgacgccggttgaacaccagaagcagaaggctgaccgtgagcaggatcacacccgcgatcatcttcaattccgcatcggtcgcggtcttcggcagctggatggtgccgggaccttgcgttgcgaccggtgagcgcttcagcgcagcgagctgcagcttgccgtcgcctgcgtcggcgcggcgttcggtcggcgcggccggcaggcttggacgctcgccgaacacctttgcaaagtcccagccggcgggcaggttgagcggcagctcggaaagcttcagcggctcgccttcggggcggctcggcgtcttgtcgaccgcgacgaggctggtcagccgcgtgacgatctgatgcgccagcgccagcgcaaggatggtcttgtcggcgtcttcagggctttgctgccgcgtggtgcgtgcgacttcggcatccgcgatcttgcggcgcgcccacagtttcgagaggcccttgccttcggcggcgttcgcgaccggcagcgtcacgctccacgggcggtcgccgatgcggcccttgatctcgatcgagccggcgagcttgtcgagcttcgcggccagcaccagcggctcgtcgcgatagatgtcgggcagcgctgacggcgtcaggtcggccgcggcatcggagaactttgcggagagcgtggtcaccgcggcattctccagcttggcgaacaggtcgcgcatacgctcgtcgacttgctcgaccgagccgatatgggtgaaggtgccgcggccgagttcggcggcgcgcgtcatcagataggtgttcggcgcggagccgatgccgaccatgaagatccgcgagcggccgcgcagcgcactgatggtctcgaacaattgctgctcgttgccgatcgcgccgtcggtcaggaacacgacctggcgaacgtggtcggcgtcgtcatggttggtgtcggacagcgctgcgcgcattgccggcaccatttcggtgccaccgcgggcctgtatcgcgctgacgaacgatgtcgcattgccgatattggcgctgttggccgcgaccggcgaagggaacagggtgtccatggtgtcgtcgaagcggatcacgttgaagcgatcggtcggctgcaggcggccgagcgcgtaagtgaggcttgccttggcctggatgatcgaggtgccgcccatcgagccggaattgtcgatcacgaagatcacttcgcgccgcaacggcttttgttgcgcctgctccaccgatggcggggtgacgaaggccagcagataatcggaactgccgatatgttcgcggaacagcccgaccgacggcgccttttctgcagccggcttccagctcagctcgaaatcgcgatcggccggcaccgggccttcggcgagcttgacgacgcgcgtggtgctgtcggggctgtcgatcctgacctgatggaaatggctcttcacctcgccgagcgggaagccggcgttgaggtgaaccgtgatgttggtcgggttgatggacgcattcgcggcgggatcaagcaccggcgaggtgatacggtcgcggtccggcaccggatcggtcgtggtggcgccccagccgttgccatcggcacggaggtcgacgctctgcaccaccgggcgcggattgtagcgcgggccgaccaccatcggcacccgcagcgagaattcgttgccgttctgccgcaccggctcctgatactcgatctgtaccagcacggtttcacccggaccgatattggcgaccgagttggtgaagatgttcggccgctcctgctcggtgagcgcagccttctggccgttctgcttggcctgctcgtagatcgcgcgggcctgctgccgctccctgatgtcgccgaccacgacgcgatcgccgaccaccatcttcagcgtatcgaccgcgccgccggacggtagcggatagacataggtcgcctccacccagtccttggtcggattgcggaagatctgcgtgacgcgggcgcggatggtcgggcccgacaccgtgagatcgacatcgacgccgagcctcaatgcttccctatagccgtcgtcggtcttgaacagcagcgagccggagcgtgcatcgctcggccgcaacaccgcctgctgcggcagttcggccgaccacaccggatcgaaactcacgaacagcgccgcaaagccgatcaccagcgcggcgacgctttccaccaggaagaacagcgcaatgcgcatccggcgcgacaggcggatctgcggactgctctcacatgcatcgtaaatcgtcattgtcgtcactcccgagcgagactttcgctgcctcgcgatcatggagaacggcggttttggcgcgagcagaatgatcggcaatgatcggccgccgtccggcgcggcccgccgccgtccaaggcggttttgtgcggttttgtgatggattgtccggtctgctagactgcgcaggttcacgaggaatcagcgcaggaacccgatgtcgacgccggacaagcagctttccgccgagcagagccagcaggtcgcggagaccatccgcgaggaaatcgcgcgccgccgaatctcacggcagaccctggccgagcaggccaagctcagcgtgtcgacgctggaaaaggtgctcggcggccgccgcccgttcacgctcgcgaccacggtgcggcttgaacaggcgctcggtgtgtccctgcgcaagctgccggaggcgatcacggtagccgcccccgccaatggcgggatcgcacccgacagcctcggctcctattcgcgccgcgcggtggcgcggatcgagggggcttacatcacggtgcggccgtcgttcggcgagcaaggcgcagtttatgcctatcggacggagatcgcgtgggacgaggcgtcgtcatcgctcggcttccgcgagggcgagcggcaggatgccgactacacccagtatggcgaggtcgcggtgcccaatgaatcgggtttcgtctatctcgtgaccaacaggcacggccagcatcgcgtgatcacggtctcgcgcccgcgcaattccggtgagatgtacggcatcatcacgacgctgcttgccggccgcggctcgctgctgacgccggtcgccgcgccgatcgcattcctgccgatcaagaacgtgccgaagccgagcctcggccgggtgtcggctgacgatgccagctacgccctctatcgcgagcatctgcgccgcacgatcgacgagccgtttgcgatcttcctgccgggctaacgtcaacagaattagccccgtcatcgaaggatgcacggcccggctggtggccgtcgacccttcgagacgccgtttcgcggctcctcagggtgacggtgagagagtcgcaaaacaacgaagccgcccggatgggcggcctcgcgatattgccagctcgtcggcatgtagcgctagccgccggtctcggcgctgatgatgtcgccgaacagctcccactgtccgttcttgaactgcatcatcttgagctgctcgaccggggcgaagtcggtcgcgctggtattgatccggatgccggggatcagcgtgtccggcgcaaaatccttcaggctggcggcctgcttcatcacgttctcacgcgtcaggttgtcgccggcctgcttcagcacctgcaccatggtctgcgccgcggcgtagccatagaccaggttggcgtcggacagattggcgcccggcaggtacttctcggcgaaagccatgaacttcttcatgccctcgtcattcttccattgcggatcggaggcgtctttgaggtacccggccgacagcacgccctcggaggcgtcaaggccggcgggcttcatcacggcgccgatcgagatcgagacgtcggtcatcacatgcatcggcttccagccgagctcggcgatcttcttgatcgcctgtgccgcgaatttcggcgtcgagatgttgacgaacacgtcggcgccggtgtccttcagcttgacgatgtgggaatcgatcgacggctccgttgtctcgtagctttcctcggcgacgatcttgacggacgacttgtcgagcacctccttgaggccgaccaggtagtccttgccgaaatcgtcattggcatagaagatcacgaccttggcatccggcttggccttgagaatgtacttgccgaagatccgcgcctcgacgcggtagctcggctggaaacccatggtccacgggaaatccttcggatcgttccacttgctggcgccggtggccaggaacagctgcggcaccttcttggcgttgtgatacttctgcaccgcggtctgggtcggcgtgcccagggcgttgaacaccaggaagacctcgtcgctctcgatcagcttgcggatctgctccacggtcttcggcggcgagtagccgtcgtcataggagatccagttgatcttgcggccgttgatgccgccctgatcgttgatcatcttgaaataggcttcctcggtcttgccgatgacgccgtaggcagaggcaggaccactataggcctcgacattgccgatcttgatctcggtgtcggaggcgccggtgtcatacttcttttgcgcaaaggcggcctgggtggagagcaggcagagcgccgcggcggcggccagcagcgacagttttgtggctttcataaaggcaatttcctcgatctatttggtggggactcaacgcaacgaacccatggccggtcccggcagacggtcacgggcaactctcgacatggccacggagacgtaactcgcgtcccccgatcatgcggcagtatcagttggcttcggctggccgaattgctgccggagcgtcggcttatgaattttgcctgtcgcattccgcggcagagcatcgatgaattcgatcaggcgcgggcatttgaaccgcgccagattggcctggcaatgcgcgtggatctcggcgggcgtcagcgtatggcccggcttcacggcgatcacagccatcccgacctcgccccattgctcgttcgggatgccgatcacggcggcttcggccacggccgccagttgatgcagcacgctttcgacctcggccggatagacgttctcgccgccggagatgtacatgtccttccagcggtcgacgatgtagtagaagccctcctcgtcgatccgcgtggcgtcgccggtatgcagccagccgtcggtgaacgaggaagcgttggcgtccggccggttccagtagcccggcgtgatgttcgggcccttgacccagagctcgccgagttcgccgatcgcggcatcgctgccgtcggggcgcacgatgcggacctcggtgtgcagcaccggcttgccggacgaacccgccttgcgtgcggcatcctcgcggtcgagcaccatcaccgccggtgaggtctcggtcatgccgtagccctgttgcagcgcgacgccgcgcgcctcccaggtcttgagcaacggcaccggcatcggcgcgccgccgacgccgccgatcatcaggcggctgaaatctgccgtggcgaacgaaggatgctgcgccatgaactggtagatcgcgggcacgccgaagaacacgttgataccctgtgagggatcgccgatcagcttcagcgcctcgccgggatcgaaggcgcgcatgatcagcacggtgccgccggcatgcagcaccgggttggtgtagcaattcagtccgccggtgtggaatagcggcagcacggtcagcagcaccgaggccggtgagatataggcggggccgccgaggttgacgcaattccagaacgtcatcccatgcgtgatgatcgcgcccttgggctggccggtggtgcccgaggtgtacatgatggtcgagatgtcatcgagcgtgacctcctcgaaccgctcgagcggcttggccgccgcgatgccggcctcataggcgccgcccgggccgagccggacggtcgcggcgacatcgcagagcttggcgaccgcaagcgcggtctcggcgaggtcgtcgtcatggatcatcaccttgggggaggcgtcgccggtgatgtagcgcaactcgggaatcgtgaggcgggtgttgagcggcaggaagaccgcgccgatccggaagcaggcgaattgcacctccagcgtatccgtggtgttcagcgccagcaccgcgacgcggtcgccgcgcgcgaccttcaggccgtcgcgcaaatgggcggcaagccgtgacacgcggtcgtggagctccgcatagccaaagcggcgtccgcttgcgagatcgacaagcgccgtcttgtccggcgtgcgccggcgatgatgcgcgatccagtcgtagtagcgaaccggcacgtgtccctcctccggaacggcagtcttgcgccgcctgttcctggctcgattgatgccacagattggcagtggaggggggctatcgggatactgtcttgcgtttagtggctgggggcggccagatggaaacccgctcccccggacagccactcgacgcaagtgaacagggaaaaatccggacatcgtctgagcccgggaatcaacggagcacgcggatggcaaacccgttctacaccggcgagcatgaggcctttcgcgaggtgatgcggcgctttgtggccagggaaatcgagccttttgcccatcaatgggatgaggagggcgagtttccgcgggagctgtacgccaaggcatccgagatcgggctgctcgggctcggttttcccgaggaatatggcgggaccgccgccgaccagttcatgaagatcgtggcctcgcaggagttggcacgcgccggcgccggcggcgtctccgcgagcctgatgagccacaccatcggctcgcctccgatcgcccgcgccgcccgccccgaggtaaaggcgcgggtgctgccggaggtgctcgccggcaggaagatctcggcgcttgcgatcaccgagccgggcggcggctccgatgtcgcgagcctgcgcaccagggcgcggcgcgacggcgaccattatgttgtttccggcgagaagaccttcatcacctcgggcatgcgcgccgactatctgacggtcgcggtccgtaccggcggcgagggccccggcggcgtcagcctgctcttgatcgagggcaatacgccgggcctctcccgtacgaaactgaagaagatgggctggtgggcatcggacaccgcgacgcttcatttcgacgagtgccgcgtgccggtcgagaacctgatcggcgaggagggccagggcttcaagcagatcatgtacaacttcaacagcgagcgcatgggcatggcggcaagctgcacggcgtatgcgcgggtctgcctcgacgaagcgatcgcctatgccaaggagcgcaagaccttcggcaagccgatcgcgcaacatcaagtcatccggcacaagatcgtcgacatggcgcagaaggtcgcggtttcgcaggcgatgctggaaatgctggcgtggcggctcggccagggcgaaagcccggtcgccgagatctgcatgatgaagaaccaggccacgcagaccatggcgcactgcgcttccgaggcggtgcagatcttcggcggcgccggcttcatgcgcggcatcaaggtcgagcgtatctaccgcgaggtcaaggtcaacgccatcggcggcggcaccgaggagatcatgaaggatctcgcgtcgaggcagatggggctgtgaatgcctctcactcaaccaccgtcattccggggcgcgcgtagcgcgagtccggaatccatcaggccacagattcgatgtgaaatggattccgggctcgtccgcttcgcggccgccccggaatgacgaaaggatggacaacgaccatgctcttcaccgccgaccacgacgaaccgcgccgcgcgttgcaaagattcatcgcggccgagatcaatccccatgtcgacgagtgggagaaggccgatatcttcccggcgcatgagctgttcaagaagctcggcgatctcggcttcctcggcctcaacaagccggtcgagttcggcggccaggggctggattattcctatgcgctgatgatggccgaggagctcggtgccatcacctgcggcggcgtgccgatggcgatcggggtgcagaccgacatggcgacaccggcgctggcgcggttcggctcagacgaggtgcggcgcgaattcctggtgccggcgatcgccggcgaccaggtcgcctgcatcggcgtgtccgagcccggcgccggctccgacgttgcctcgatcaagaccagcgcccgctccgacggcgacgactatgtcatcaatggcggcaagatgtggatcaccaacggcacccaggccgactggatctgcctgctcgccaacaccagcgacggccaggtccaccgcaacaagtcgctgatctgcgtgccgatgaagaccaagggcgtgcaggtcgcgcgcaagctcgacaagctcggcatgcgctcgtccgataccgcgcagatcttcttcgacaatgtccgggtgccgaagcgcaaccggatcggcgaggagggccagggcttcacctaccagatgatccagttccaggaggagcggctgtggggcgcggccgcctgcctgaaggcgcatgaattcatcatcaacgcgaccatcgactacacgcgcaatcgcaaggcgttcggcggctcgatcctcgacaaccaggtggtgcacttcaagctcgccgagatgcagaccgaggtcgagctcttgcgttcgctgatctaccgcgcggccgaggcgctggtggcgggcgaggatgtcacgcggctcgcgaccatggccaagctgaaggccggccggctcggccgcgaactcaccgacgcctgcctgcaatattggggcggcatgggtttcaccaacgagaccccggtcagccgggcctatcgcgacagccgcttgacttcgatcggtggcggcgctgatgaggtgatgctcatggtattgtgcaagatgatgggcacgctgcctggcctgaagaagggaaacgcctgatgatcacgctctatcactgcgacgccgcgcgctcgttccgcccgctgtggatgctggaggagctcgggctgccctatgagctgaagatgctgccgttcccgccgcgggtgttcgccaaggaatatctcggcatcaatccgctcggcaccatcccgttcatggtcgatggcgagaccaggatgacggagtcctccggcatctgtcattatctcggcaccaaacatggcccgacgccgctgatcgtgggcatcgacgagccggcctatggcgcgttcctgaactggatgtatttttccgatgcaacgctgacctttccgcagacattggtgctccgctacagccagctcgagccggaagagcggcgcaacccgcaggtttcgggtgactatgcaaaatggttcctgggccgcctgcgtgcagtggaagccgccgccgccaagtctgaattcctctgcgcggaacgcttcacggccgccgacatcgccaatggttatgcgctccggcttgccagcaatatcggccttgccaaggatttcgggccgaatgtcgcggcctattgggcgcggctgcagcagcgcgacggttacaagcgcgcggtggcatcggagcagaaagccgggcaggaacagaatgttgcgccgcgggcgcggccttgaccgcgccagcgtcgatgtgtccgggaattgatccagcgcgtcggtgacaggccgccaatttgcgctatggtggttcggccgcagcggccccaagagccgcgcgaggaggaaccgccatggacgcgatcgtggacgcgaagtgccagaaatccggccagcagcagtccggccaccggatgctgattacgccggaacgggtgttctatgccgggctgctcggccgcccgcgtgaacgctgtcccggcgcattccatgtctatgtcgcgatccgcgatggcttgcatctgtcgaccagcgagggccgtgaatcccacggcgaactcgcggtgacgatgccgaacctccgccacaccatcaccagcgaatatcgttcggcgatctgcgtcgcgatcgagccggaaagcgtgcctgacggtacgctcgaagccgtcgcccgccgcctgcagggacccgattctcatttgtttgcgaaccggattcgcaacgcctatgccacgctcggcgagatgcagcatcgcgacgcgatcgccaatgccgagttcgacaccatgtgcttcggtgacgcgctgccgcagcgcgtgctcgatccgcgcgtcgtgcgcgcgatcggccgcatcgggcagttctccggcgagccggtgactgcggcaggctgcgccgccgaggccgggctttcgccgtcgcgcttcctgcatctgttcaaggaggagaccgggatctcgttccgttccttccgcgcctggaagcgggcgcggcatctgctgcatttcgccaaccaggacatcaacctcgcgcatctcgcgcaggatatcggctatccggacagtacccatttcagccactcgatccgccgcttctatggcttaaagccgcgcgcgatcttctccggctcgcgtgatcttgcgatctaccggacggggcaggagcgcgcgctgacgtagctccgctgtcgtcccggcgaaggccgggacccataaccaccatagcctgtcggttcgacaggtgtctgccatcccgatccatcgatagatcacgcggtatgggtcccggctttcgccgggacgacacctgggattttctacccttacaaattcgcgccctggatcacctcgccgaaccgcagccagccgggcccttcgatccgttgcagctgcagctgctgcagcgggtgatgattggtcgggctggtgttgaccttgatgccgggcaacagcgtcggcacttcgacatctctaagattgttcgcctgcgccatgatgttgtcgcggctgaagttgcccttgcactgctcgagcacgatcttgagcacctgcgccaccgtgtaggcgtagagactgtagccctccttcgggttgccgtcgggaaagtacttcgccatgaaggcgaggaaatccttcacgccgggatcattggcccaggccggatcggcgacgtccttcacataagccgacgagatcgtgccctgcgacttgtcgaggccgacgggcgcaatggtcgaggagatcgatgccgcgccgctggcgatgaaatgcatcggcttccagccgagctcatagatcttgcggatcgactgcgcgcagaactttgccgtggtgcccgagatcagcacgtcgggattggcgccgcgcagcgcgacgatctgggaatcgatggtcggatcggtgacctcgtgcgaggccacgacggccgacgtcgcgaaccgctcgccgagcacgtcccttgcgccggcaacgaaatccttgccgagatcgtcgttctggtagaggaccgcgaatttcgcgtccttgtgctggctcagcgcatatttgacgaacacctgtgcctcggtccgcgcgcttggcgcaaagcccatggtccagggataggtcttgtagtcgccccatttgtcgccgtttaccgacaggaacagatgcggcaccctggcggcgttgatgtatttgacgaccgacgaattcggcgcggtgccgagcatgttgaacaggaaggcgacattgtcgctctcgatcaggcggcgcacctgctcgaccgtcttcgccggattgaacgcgtcatcgtaatagatgtacttgatctgccggccggcgatgccgccctgttcgttcagcatcttgaaataagcttcctggcagcgcgcctgcacgccgagcgccgacaccgggccgctgagtgaagtggtgctgccgatcctgatctcggtcgcggtgacgccgggcatgtcttcggcgaacgaaggtttgagacctccgactgcggcaagtcccgcacctgccgcgccggtcagccaggtgcgccggttgatcgagaccatgtcgttctccccgtgatgccggcttgttgcgccgctttgctttgcagcaaggctacgcgtcacgtgggcgtggcgtcttgtgttaaccggctgatggcggattgtgtcgtgagcgcatcgacacagccagtcaacgcaagatggccggtcggcaaatttctcatcatgggaaaatcagcagcgcacgtgcactgcaaagcggacaagagacccatgagcgacaaggccgtcatcacctgcgcgctgaacggcgtgcttaccgacccgaagcagcacaatgtcccggtgacgccggagcagatggcgcgcgaggccaaggccgcgttcaacgccggtgccagcatcatgcacattcatctgcgtcagcaggagccgaacaagggccatctgccgtcctgggacgtcggcgtcagcaaggaaatccagcaggcgatccgcgaggcctgccccggcgtgatcatcaaccacaccaccggcacctcgggtccgaattatcagggtgcgctcgactgcgtgcgcgagaccaagccggagatcgccgcctgcaacgccggctcgctgaattatctgaaggtcaaggccgacaacacctgggcctggccgccgatgatgttcgataacgcggtcgagaaggtgcaggattatctcgacgtgatgaagacggccggcaccatcccggaattcgaatgcttcgacgtcggtatcgtgcgctgcgtcggcatgtaccggcagaccgggatgtattccggcccgctcgaatacaatttcgtcatgggggtcgcctcgggtatgccggccgatccggagctgttgccgatcctcctgaagctgaaggcgccggaggcgcattggcaggtcaccgcgatcggccgcgccgagatctggccgctgcaccagcgcgccgccgatctcggcggccatctgcgcagcgggctggaagatacgttctatctcggcgacggcaccaaggtgacgtcgaacggacagctcgtcgaagggctcgccgcctgcgcccgccgcgccggccgcgagatcgcgagcccggcggaggcgcggcagattttcggggtcaggcactgacgtcattccggggcgcgcggagcgtgaaactcagatgcgcaattgcgcatcggggaatccatcaggccgcacgtcctttggcgccatggattccgggctcagcccttcgggctgccccggaatgacagcgagcaaggagcaaggcatggacaatctcgcagcaaccggcggcgtcacgggcccaggccgcatcgggcgggtcgcgatcggcgatctgctgaagcgcgccgcgcggcggtttccggatcgcgtcgcgctgaccgatggcggcagacaggtcaccttcaccgagctcgaacgcgacgccaatcgcttcgccaaccatctggtgcagcgtggattgaagccgggtgagaagatctcgacgatctgcaacaactccgtcgagttcgtcaaagcgctgttcggcatccaccgcgccggcctggtctgggtgccgatcaacaccatgctcggcccggcggacatggactacatcctcggccatgccgaagtccgctttgccatcatcgacgacaacctccatgcccaggccgaccggcgcgccgcgctggaggcgcgcggcatggagatgatcgcggtcgacctggctggcaacgcgggcaagaccggactgcaggaattcaacggcctgctggaagggcagtccgacatcgagccggagatcgagatcaatgaccgcgatctcgccatgatcatctacacgtcaggcacgacgtcgcggccaaagggcgcgatgcattgtcaccttgccgtggtcatggccgtgatgagcaactgcatcgagatgcagctgtcgcgtcatgacgggatcaccgggcagtttccgttgttccattgcgccggccatgtgctgctgctgagttatctctcggtcggcggtcgcatggcgctgatgcgcggcttcgatccggtggtctgcatggaggcgatcgtccgcgacaggctcacggtgttcgtcggcctatccttgatgtaccaggcgatcctcgatcatccgcgccggcgcgaatacgatttgtcggtcctgcgctgctgcatctacaccatggcgccgatgggcaagccgctgctcgagcgtgccatcgccgacctctgtccgaatttcgtgctgaccagcggccagaccgagatgtatccggcgacgacgatgtcgcggccggaggtgcagctcgaccggttcggcaattactggggcgagtcgcttgttgtcaacgagaccgcgatcatggacgacaacggcaatctgttgccgcgcggcgagatcggcgagctggtgcatcgcggccccaacgtgatgatgggctactacaaggacccgaagtcgaccgaggaggcacgcaagtttggctggcatcataccggcgatgttgccctgatcgatgccaatggcgaggtgctgttcctcgatcgcaagaaggacatgatcaagtcgggcggcgagaacgtcgcctccgtcaagatcgaggagacgttgctcgcgcaccccgccgtgcagaacgcagccgtggtcgggctgccgcatccgcaatggggcgaggcggtctcagccttcgtcaagctgaagcccggtgcggtcgccgacgaggccggtatcgaggcgcattgccgaaagcatctcggcggcttccaggtgccgaagctggtgcgtatcctggaggagatgccgatgaccgcgaccggcaagctgcgcaaggtcgaactgcggcagcagtatagcgggcattttgtggagcgcgcctagtggccatcatcgagaacacgatttccaccagcagcaacacattccagggcaatcgcgacggcatgctggcgctgatcgcacggatgcgcgggctggaggagcgcacgcgcacggcctccgccgccgccaaggatcgcttccacaagcgaggccagctgctgccgcgcgagcgcgtcgcgctggtgctcgatcccggctcgcccttcctcgaattgtcgacgctcgccggctacatgttcgatgtggctgatgccgacaggagcgtgcccggcggcggactggtcgccggcatcggcttcgtctccggcatccgctgcatggtcagcgccaatgatgccggcatcgacgccggcgcgctgcaaccttacggtctcgacaagacgctgcgggtgcaggagctcgcgctggagaacaagctgccctatgtgcagctggtcgaaagcgccggcgccaacctgctgcgctaccgcgtggaggatttcgtccgcggcggcaacattttccgcaatctggcgcgactgtcggcggccgggctgcccgtcgtcaccgtgactcacggctcctcgaccgcgggcggtgcctaccagaccgggctctccgactacatcgtgatggtgcgtggccgcacccgcgcgttccttgccggaccgcctttgctcaaggccgccaccggagagattgcgaccgaggaagaactcggcggcgccgagatgcacacccaagtctcgggacttggcgattatctagccgaggacgaccgcgatgcgctgcgcatcgcgcgcgagatcatggccaagctgccatgggaccggccgagcccagaacctgccgcgttcaagccgccgcgctacgacgccgaggaattgctcggcatcatgccgatggatcacaaacgacccgtcgacatgcgccaggcgatcgcgcgcttcatcgatgattccgatttcaccgagttcggtgccaattacggacctgccacggtctgcggtcatgcccgcatccagggccaagcgatcggcatcatcaccaacaacggcccgcttgatgtgcccggagccaacaaggcgacgcatttcatccaggcctgctgccagtcgcgcacaccgatcctctacatgaacaacaccaccggctacatggtcggccgcgcctacgaggaggccggcatgatcaagcacggctccaagatgatccaggcggtaacctcggcaacggtgccgcagatcacgctgtattgcggcgcctcgttcggcgccggcaattacggcatgtgcggccgcggcttccatccgcggttctgcttctcctggccgaatgcaaagaccgccgtgatgggcggtgagcaggccgccgaaaccatggcgatcgtcacggaggcggcggccgcgcggcgcggcaagccgatcgaaaaggagaagctggacgccatgaaggcgcagatcaccggtgtgttcgacagccaaatggacgtgttctcgaccagcgcccgcgtgctcgacgacggtgtgatcgatccgcgcgatacgcggacggtgctgtcggaggtgctttcgatctgccgcgaggctgaggcgcggaccccgcagcgcatgcagttctcggtggcgcggccatgagcggtaccatcgtgaagcggacgccgttcttcaaggttttgatcgccaaccgcggcgagatcgcgctgcgcatcatgcgcacggcgcggcggctcggctacagcgtcgtcgcggtctactctgacgccgaccgcgacgcgctgcatgtgcgcgaggccgaccaggcggtgcggatcggtgaggcgctgccggcgcaatcctatctgaagatcgacgcgatcatcgcggccgccaaggcaagcggcgccgccgcggtgcatcccggctacggtttcctcgccgagaacgaagactttgcgcaggcttgccgcgatgcgggtctggtgttcattggcccgtcgccggaagcgatccttgcgatgggcaacaaggccggcgccaaggacatcatgcaaaaggccggcgtgccctgcttgcccggctatcagggcgccgaccagagcgatgccgcgatgctggcggaagcgaaggcaatcggcttccccgtcatgatcaaggcggtggccggcggcggcggccgcggcatgcggctggtcgcggacgccgcggcgtttccggatgcgctgcgcagcgcgcgatccgaggcgcagggcgcgttcggcgaccccaatgtgatcctcgagcgcgcgatcgtcgatccgcgccacatcgagatccaggtgttcggcgaccgccatggcaatgcgatccatctcggcgagcgggattgctcggtgcagcggcggcaccagaagctgatcgaggaggcgccgtcgcccgcggtgacgccggagctgcgcgcgctgatgggcgcggtcgcggtgcaggcggtcaaggcgatcggatacgagggcgccggcacgctggagttcctgctcgaccgcgccggcaatttctacttcatggagatgaacacgcggcttcaggtcgagcatcccgttaccgaggcgatcaccgggctcgatctggtcgaactgcagctccgtgtcgccaggggcgagccgctcggcgtgagacaggaggacgtcaccttctccgggcacgccatcgaggtgcggctgtgctcggaggatgccgcgcacgacttcatgccgcaatccgggacgatggcgcgctggcagatgcctgacggcatccgtgtcgagcatgcgctgcaatccggctcggagatcccgccgttctatgattcgatgatcgccaaggtcatcagccacggcgcgacccgagacgaggcgcgcggcaagttgatctgcgcgctggagcaggtcacggcgttcggcgtcaccaccaatcaaggtttcctgatcgactgcctgcgtcatccggtcttcgccaagggcgaggcgaccacggccttcatcggcgacaaccgtgatgcgctgttggcgccgcgggccgatcgcggcagcgacctcgcgcttgcggcgctgctgttctacgtcacccatccgcatgcgccgccatggcagcgcggccggtcgctgtcggcgacattcccgctcggcttgcggatcgatctcggccatggcgtgcaggagatcgagatcgtccgcgaacgcgacgggaactacctcacgagccgcaacggcgatcgcttcagcttcgtgatcgacgagctcgatcaagacagcatccgcttccaccatgatggcctgatggagcaggctaaattcctgcgcgatggcgatcggctctttgtcttgcatcgcggcgtcatgctgtcggcccgcgacctcacgcttgcgccaccggagagtgcgtcagtcgccggcggcgacggcatggtgcgtgctgccatgaacggccgggtcgtcgcggtgctggtgaaggctggcgacaaggtcgcggccggccagccggtgatgacgctggaggcgatgaagatggaacatgtccacaccgcagggatcgcgggcacggtgtcgtcgatcgatgtcgccgagggcgaacaggtcacgacgggcaagatcgtggtggagatcgaggctgccgcataacaggtgtcgtcccggcgaaggccgggacccataaccacgaatgttggttggcggcacgatctccggccgcttgccggtttccatggccgcggcgtatgggtcccggccttcgccgggacgacggctgagttactcgtcgcgccccgttccatcattcagccagcaggccacctgatgtctcgcgccggtcgcctgcaatcctgggcgctccgtcctgcaacgatcgatggcgtagcggcaacgggtgtggaaggcgcagccgggcggcggattgatcggactcggcacgtcgccgtcgatcagcggtgcggaacgcttcgccttggggtcggcgatcggcaccgaggcgagcagggcctgggtgtagggatggcgcgggttggcgaacagctcgtgcttgtcggcgatctcgacgatgcggccgagatacatcacggccacgcggtggctgatatgggcgacaacagcgaggtcgtgtgcgatgaacaaataggaaaagttctgctggcgctgcaggtcgatcaacagattgatcacctgcgcctggatcgagacgtcgagcgcggagaccggctcgtcgcagacgatcagccgcggcccgagcgacagcgcacgcgcgatgcagatgcgctggcgctggccgccggagaattgatgcggaaagttcttcatctggtcggcccgcaggccgacctgctggaacagttccgcgacccgatcctgcttttttacgccgcgcgcgaggccgtgcacggtgagaggctcgccgacgatgtcgcccgccgtcatgcgcgggttgagtgacgcgaagggatcctggaacacgatctgcatcgaacggcggtacggccgcagcgccgacttgctgagcggcgcgatgtcctcgccatcgagcctgatcgcgccgctggtcggctcgaccagccgcagcacggtgcgcgcgaccgtcgacttgccgcagccggattcgccgaccaggccgagcgtctcgcccgcgccgagtgcgaagctgacgccgtcgaccgcgtgtacggtgccgacctgccggcgcagcacgccgccgcgcaccgggtagtgcttgaccaggtcagtgacctcaaggagcgggcgctgctcggtcatgacgccttcgccatctcgccggcgcgccagcatgcggcccagtgattgctcttgacctcatcgagcggcggatattcctggcgacagcggtcgaccgcgagtttgcagcgcggcgcgaaggcgcaacccggcggcagccttgtcagcgacggcaccatgccggggatttcgatcagccgcacgtcctcgctccggtcgggcgagggcaccgcggggatcgaggccatcaggccgcgcgtgtagggatgctgcggcgtctcgaacagagcttcaaccgtcgcctcctcgaccttcttgccggcatacatcacgatcacgcgctgcgcggtctgcgccacgacgccgagatcgtgggtgatcaggatcagcccggtgccgagccgttgctgcagatcgacgatcagcgccaggatctgcgcctggatggtgacgtcgagcgcggtggtcggctcgtccgcgatcagcagcgccggccgacacgccggcttgcttccaagcttccttgctgctcaccttctgatgcagccgcaccgcctcgatgatctggtcgccgatccgcatcaccggattgagcgaggtcatcggctcctggaagatcatcgagatgcggttgcccctgatgccgcgcatcgcggcatcgtcgagcttcaggaggtcggtaccctcgagcgtcaccgaaccgccgacgatgcggccgggcggatccggcaccaggcgcatgatcgagagcgcgctgacgcttttgccgcagccggactcgccgacgatcgccagcgtctcgccgcggcagaccgagaacgagacgtcgtcgaccgcgcggaataggccggaattggtgaagaacaccgtctgcaggttcttcacgtcgagaaccatctctgccgcaatcgtctcgctcatcagccgcgctgcctcggatccaggatgtcgcgcagcgcgtcgccgaacaggttggtgccgaacacggcgaggctgatcgcgatgccggggaagatcacgagccacggcgcggtgcggacatattcggcggcagattccgacagcatgcggccccaggacggatagggctcgggaatgccgaggccgaggaacgacagcgacgcctcggtcaggatggtcgagccgagctgcgcggtggcgagcacgatcaggggggcgatggtgttgggcaacacgtggcgcagcgcaatccgcatatcgctcatgccgatcgatttggcggcctcgacgaacggctgctcgcgcagcgccagtgtgttggcgcggatcacgcgcgccacggtcgggatcaagggtatggcgatcgcaaggatcacgttcggcagtgacgggccgagcgcggcggtcatgacaagcgcgagcaccaatagcggcagcgattgcaggatgtcggtcacccgctggaacacgagatcgacccagccggagagataacccgaggcgaggcccacgatgacgccgagcgtggcgccgagcgtcgtcgagccaatgccgaccgcaagcgagattcgcgcgccatggatgatgcggctccagacatcgcgaccgaaggaatcggtgccgaaccagtgcagcgcggagggcgcggcgagccggtgcgtggaatcgacggtgagcgggtcgtagcggctgatgacattggcgaagattgcggtcagcacgaacagcagcatgatgatcaggccgatcgtgccgagcacatgccgctgcgcgaggaaggccagccgcccccagccgccggtggcgttggctccggcgcgtcgcaattcgctgtcgaaattgatcgacgccatcaggtcagtctccgaaccggatacgcgggtcgaccgccgcatagatcatgtcgacgatgaagttcacgaccaccacgacgacggcgatgaacatcacgaggttctgcacgatcggatagtcgcgccagcgcagcgcctcgaccaggaagcgagcgatgccggggatgttgaacacggtctcggttacgatcagcccgccgatcaggaacgcggcctcgatgccgatcacggtgatgaccggcagcacggcgttcttcagcgcgtggtgatagttgacggaagcctcggaggcgcccttggcgcgcgcggtgcggatatagtcctggcgcaggatctccagcatcgaggagcgggtgatgcgcatggtcagcgccgcgctgcggaagccgaccgccatcgccggcaccgcatagatgctgaacgcctcgagccaggtcttcgggttcggattgaagatcggcatggtgccgaacagcgagaccgaggccatcaggatcaacagcccgagccagaacgacggcagcgacaggccgctgaggctgacgacgcgcagcgcgtagtcgagcttggagccctggtgcaccgcgctgatcaccccgagcggaatgccgatcgaggcggagaacagcagcgccaggcccgcgagccgcgcggtgatcggaatccgcggcaggatctcctccagcgccggcttctccgagacataggaatagccgagatcgccgtgcagcaggccgccgatccagtgcagatactggatcacgatcggctggctgagcccgagctcgcgctccagattggccttgtcggcgggatcgacgaagccggcagcatcgaacaggatatcgacgatgttgccgggaacgacgcgcagcagcacgaagatgatgaccgagatcccgaacagggtcaccagcatcaggaacagccgccgcacgatataggcaaacaccctggctctctccctgatctcgcttgtggcttatttgtccagccagacgtcttcgtaacggtagccgttataggagctgttggacatgatcgtgacattcctcacgtagggcttccagcaggtgccggtgcgagcatggaagatgatcggccgcgcgacgtcttcctgcagcttcctgtcgatctcccagaccagcttcttgcgcttgtcgacgtttgtctcttccgactgctggtcgaacagcttctcgatgtccttgttgcaatagttggtgtaattccgctccgagccgcaggcatagttctcgtagaacgactggtcgggctcgtcgacggcgttgccggtgaggttgaggccgagcgaatagtccttgcgcgcgatcttcgggaaccattgcgcggtgtcgaccacgtcgagctcggcgtcgatatagatgctcttgatctggtcgatcaggatgatcgcggggtcgcgatagaccgcgatgttgcgggtcgacaccttgatctgcagatgcttgtccggaccatagcccgccttctgcatcagtttgcgggcttcctcgcggttcttctcgacgtcgggcccataccctggaatcgattcgagcatctccttcggcatcgcccacaggccggcgggcgccggctccatggtgccgccgatgtcgccctggccctcgaacatgatctggatgaacgccttgcgatcgagcgccagcgctaaagcacggcggatgtcgagattgtcgaacggcggggcggttgaattgatgatgatgttggtggagacgttgttcggttccaccacgcagaccgcttttgggtcctgcgacttgacgtccttgagcagggggatcgagacctcggtcgggaacgtcatgtcgaacttgccggagacgaagccgaggatcgcggtcgagcggttcgggatgatggtgaattcgataccgtcgagatggggcaggcccttcttgaagtaatccgggttcttggtgagcttgatcgattcgttggccttgaactcgacgaatttgaacggcccggtgccgacgggcttggtgcgcatctccgccggcgagacgtggcagggatacaccggcgaatagcccgaggcgagcagcgacagcagcgccggctgcggccgcttcagcttgaacgacgcttcatcatcgccgttggtcgtgacctcgtcgacctgatcgtaccaggatttgcgcgggttctgccggaacttctgcggcgatttgcccatcagcatgtcgaaggtgcatttcacgtcggccgacgtgaacggcttgccgtcatgccacttcacgtccttgcgcagcttgaaggtcagcgtcttgttgtcgccgctccaggcccagctttcggcaagctccggccggatcgtgctggtgctgttctgcgcgacatgctgatcgaagatcacgagattgttgaagatcggcatgaacggaatgttcaccgaataggtcgcgccctcgtggatcgaggcactgccgggactatcgcggtgatagatcctgaagatgccgccggatttcggctcggttgcgcgtgaaacgtcgccgacggtcagcacagataacaccgcgacggccagcgcttgcacgctccgcatggtcccctccacgaatttcggtctcaatggccgattggcatcgacgataccacggtgaggctgtcgggcaaccggcgagggtcacgaagggattggcaattcggatgacaactgaccataaaattcccggggaccgggaatattgggtctgatgatgtggaactccggccgttctgctatgtggtgacgagtctctgttggaatttgattgctaacgctgaagcgtgtggcgtgaagctgactgcaatcagcgacagtttgtcgccgattgctagtgtcgcggttggctcgttcccgtcatcccgaggtgcgagcggagcgagcctcgaaggatgcacggccaccagccgggccgtcgatccttcgagacgcgcttcgcgctcctcaagatggcggtgtcgcatcaccactcgcttcactccgtcgcctgcggcgaggggagttgcatgttggcgacaccatcggcgtcggtcgccgagatggtggtgcggatcatcaggcggccctcatgcgccggccaggggcggccgcggtgcatggtggcgcggttgtcccacatcacgacgtcgccctgtttccattgatgcagatagctgacgccgggcgcggtcgccgcttcggtcaattgctcgatcagcgccttgccggcatcggcatccatgccctcgacgccgtaagcatgggaggcgagatacagcgcgccgcggccgttgaccggattgcgccagaccatgcgccagcacaccggcggcagcgcgtcgacctcctccgtcgtcgcgagcccggcggccaccttgctgcgcgaatgcgcgtaggaatgccaggcgaacgagttctccagccgcctcgccacgtccttgtcgagccgctcgaaggcgagccgcatcgagacgaattcggtctcgccgccatgttctgggatgatccgcgcggacaggatcgaggtcagcgccggcacgcgcttgaaggaggaatcggtgtgccagagctggttggccttggcgcgcagctgctgtcggtgatccgacggcaccacctttccgtcgggcccgaaggtcgagaggatcacgaaatgcgagccggtgcccatcgagccgactttggtcgtctcgggcggaccgaagcggcgcgagaaggcgagctggacgtcgtcgctgacctcctggtcgcgaaacaccagcaccgaatgttcctcgaacgctgcgcgcaccgccgcgtaggccgcatcgctggcggcaacgtctgacagcgtcacgccgcgcagctcggcgccaaacccctcgcgcagtgggatcacgtccatcggcagctcctccctgatttttcttgttgaagcgaggttagggcaaaaccccgccaccggcaacgcggcccgctgcatctcaacccattgcgatcagattgtgccgtgtgcgtcgttcggcgacctcaatgcgctgcgtgacgaaggcgaacagcgcccagctcgaatgaaaggcgacgccggcaaggaccacgatggctcccggaagcggcccgatcgaggcgcggtcccagatgtcggtcaccgccaccaacggcagcggatggatcgccagcttgccgtaataggcgatggcctggatcgcgaaaatccagccgtaggtacggcgcagccgccggccgaccgcgcgggcaaagctgatgtggtagctggggcggcgatagtcgttggccagcagctcggtccaggccgcattcggcgatgggtcttcgccgcggatcatcggcgcgtagaaatcggtttcgagcagccgggcacgggcacgccagacattgaagtagcggtagcgtcgcgcctcgaacagcaggaagaccgtcaccagcaggccgaccagcaccatcggcagaggcgatgcctccgcattgctgtaggtcgcggacagcgcgatcccggtggtgacaacagcccagttggtcgagctgtcgaggcgggtgcgccagactgtgctgcggtagacctcgccgcgatagaggtgggcgagcgcgccaatctcggcggcagtgaattcgagcctgccggcctgcaccggctccggctcgcgcggctggggcgacggcatggcggcctccggcgaagctggcttgcaatcccggagcatagcgcgaaatcagcgcgaggggcgagtccgtcgcgcggcggcgcgtgcccgatcggatcagcgtcgtcagccgcatcgctcggctcacacgatccgcgaggtcttgttgccccagtagcggtcgcgcagcaggcgcttgtagagctttccggtcggcagccgcggcagctcggcttcgaaatccaccgagcgtggcaccttctggcgcgacaaggactggctgcagaacgcgatcagctcctcggcgagctccggccccggcgcgatgccctcggccggttgcaccaccgccttcacctcctcgccgagatcgacattgggcacgccgaacaccgcggcgtcggcgaccttgggatgggtgatcagcaggttctcgcattcctgcggatagatgttcacgccgccggagatgatcatgaaggtggcgcgatcggtgaggtagaggaagttgtcgtcgtcgacatagccgacgtcgccgaccgtgctcatgctgccgtcggccgagcgcgcctcgctggtcttggccggatcgttgaaatactcgaacggcgtcgcggtcttgaaccacaccgtgcccggcgtgcccttcggacagggctgcatgttctcgtcgaggatatgcaggtcgccgagcaggaccctgccgacggtgccgcgatgtgcgagccattcctcgctgttgcaggcggtgaagccgaggccttcggtcgcgccgtaatattcgtggatgatcggcccccaccacttgatcatgtcgtccttgaccagcgccgggcagggcgcagcggcatggatcgcgatctcgagcgtcgacaggtcgtagcgggtgcgcacctgctcgggcagcttcagcaggcgcgagaacatggtcggcaccagctggctgtgggtgatgccccacttctcgaccagcgcgagatagcgttcgggatcgaagctctccatgatgacgacggtgccgcccatccggatggtcagattgaccgcggcctgcggcgccgagtgatagagcggcgctggtgacagatagaccatgccctcgcggtagtgccagagcttggtcaggaaatcgaacagcggcaggttttgcgacggcggctgctccggcagcggccgcacgatgcccttgggccggccggtggtgcctgaggaatagagcatcgcggtgccggcatattcgtccgcgatcggcgttgccggcagtcctgcggtggcttctcgcagtccgacgatgcgatcgctctcgctgtcgccgtcgaccacgatgcagagctcgacctgcgggcactccttgagtgcctcgcgtgcgatgtcgagcttgagcttcgaggtgatcaggattcgcgactggctgttggtcaggatgtaggcgagctcgcccgcggtgaggtaggaattgacgcaggtgtaatagaggcccgcgcgctcgccggcgccgcaggcctcgaggtagcggttgttgttttccatgaagatcgaataatggtcgagccgcttcatgccgcggttgcggaacagatgggcgaggcggttgttgcgcgcctccaactcgcgataggtgacgatctcgccggtcccggccatgatgaaggcgggttgcagcggacgcaggtaagcatgcttgccggtatacattgagctttatttccccctcactcgcaacttgatcatgccctaggcagccatcagcaaaatctcgcgaacctgcgatggaccgtcgatcttgcgcgggttgcgtggcacccagggcgtgcgcatcgcacccgccgcgatgcggtcgaaatgttcagggccgacacggacctcggccaggctgcgcggcatgccgagatcgcggatgaagtggtcgagcacgtcgcctgcgtcctcgcccggacgccccatcgcggcggcgaccagcgcctgccggccggcattgtcgcgcttgttccagcgcatcaccgccggcagcatcacgcaggaggtgtagccatgcggcacgtcgaactcggcgccgagcacatagccgatgccatggctcgcgcccatcggaacgccggaggcgagcgggccggtcgagagccaggtgccgatctggcaatccatccgcgccgagatgtccttcgggttggccttcacccgcggcaggccggccgccagcatctcaagtcccttcagcgcctgcgcatcgccgtaaggatgcgcctcgcgcgagcagatgccctcgacgcaatggtcgaccgcgcggatgccggtcgacagaaacagccagtccggcgtgtgcaccgacaggtccggatcgaggatcgtggcgcgcggcatcaccagcggatggcgcagcatctccttctgccgcttgacctcgttggtgacgcccgcgatcgacgagaactcgccgccggcgatcgtggtcggcacgctgatctggcgcacggccggcgaattcatctcgggcgagacgccaccacgggtgcgaatcgcatcgatgccgtcggatgtggtgacattgttggcgaggcagagctgcaccgccttggcgccatcggtgatcgagccgccgccgatggtgacgatcagatcggcctgcgcatcgcgcgcctgttccgtcgccgtgatgaccgcggcgcgcggcgtatgcgccggcatcttgtcgaaggtcccgacgcagcgggacccgagcgccgcgcggactttctcgatctcgtcggtgtcgcggttcagcgtgcccgacaccatcaggaacgcgcgctgcgcgcccagccggtccagttgctcgacgacggcctcacgggcgggccgcccgaacacgacctcgtccatggcgccgaatacgacacggcctcgatgcacgcgcctctccctcaaaatggtccgccttgccggcggtcgtttgggtggaggttagcggaggaaatcggggtcgtcatcagggacctcggtggcacggtcggaggctccgcatccaccgccgtcgtcctggcgaaagccaggacccatagccaccgcattcggtgatgaacgggattgtggctccagcgtcgcgcaagggccgcccctctatcctcccgtcattccggggctcgcgaagcgagggcccggaatccatcgggccgcatcacttttggtgaaatggattccgggtgcgacgcgctttgcgtcgccccggaatgacgagggagagagcaactccggaatgaccgcgagagagcacggcagaagccttgacggtatcgtcgcgacgtgtgttacacgtcgacagcaacaaggacgtgcgcatgaccaccgtcgatctcgcgaaattgcatattgatgacttcacgccgtaccaggatgccgggttcgagttgcgggcggcggatcgcgtggtggtgctgaagctcgccaaggtcgagcccgcgggcaacagcggccggccgggcggcgcgttctcgctgctgttcgcggggccgaagggggcctggctgccgcaggcgatctatccggtgcggcatccggcgctcggcgtgatcgacatcttcctggtgccgattggcccgctcgaagacggcaacggctatcaggcggtcttcacctgaccgccgggagcttccggtgcgcgccagcgcatcaggtcgtagacgcccttgtcttcctcggtcacgaagccgagccggcgatagagtcgcatcgcgggattgtacttctcgacatggatcgacatcgccttgccggccgcggcggcctcgtcgagcaggtcgcgcatcagcgcgccgccgaggccggatccgcgatattccggcagcaaggcgatatcgatgacgcaatgctcgctcggccagcggtcgagatagagacggccgacatcctcgccgccgcgcatcgtcaccagccagtcggcggtcggataatgctgctggtaatgcgcgtgctgcgcctggaattgcatggcgaggaaggcggccttctgctccgcgctccacggggtgaccgccagttcctcggtgcgggtcgaggcgtagagccgcgcgaggaacggcaggtcggcttcggtgatatgacggaaggtcaagccggcatccgccgcgcgtgtccacccgaacgccgcggaaaccctatctgtgctcaagccatccgccatgtccagctcagctgcgcggcgggaaaatgccctgcaacgcgatgcagaagttcaaggtgagatagggcatcaaattgttgtggggcatgctgccgccgttcggaagtatcgagctggccggcgcgaactgcgcaatgttgctcagcgttgccgtgtaggcttggcccgggttcgcgcgcgccagcgatcgcgccgggctgggcgtggcgagatccgacggattgatattgccttgaatcggatggttgtgctgaggcatttcgctttgcagcaatgtcacggagggggtgccgccgttctcgcccaggatgtaggaggagccggtgatgctctgcccctgctgcatcggcgaattgccctgcatgttgggcagcgcgaagttgctcctgccgtcgccgccgtaagtggtgccgagcaaggagaacagcgcggtgttctgcgagatcggcatcagctggccgttgcagaaggcccatcccttgggcgcaaaattgaacgggaatatgcggatctcggccaagaatggatcagacatggtcccgtcctaggtttggctcggataaacgccgaacagtgaaataatgaagttgatgcaaaggtagggctgcatgttgttatgcggctggttgccgccgacgaacgtgcacgcctggttcgccatcgcagaggcggccggggcctcgcgatagatctgggtcgcgcccacactgcccacgacattgccggtcaccgtgttgccggtcgcattgttcagcgatgcggccatcgggtggttgtggacgggcagttgctgggtgatcagcgtcacctgttcgacgcccccggtctgccccatgacgaagccagcgccctggtgcatcggaaggcggccctgcaggttcggcagcgcgaatgtcgactggccgtctccgccataggtggtcccgatcaaattgtacaaggtgtcgtactgatcgatcggcacgacctgtccctggcaaagcatccaaccggccggcgcgaaattgccgccgaacatccgaatttcgccgacgtagggctggctcatgatgggcgtccttcaggtctgggagggaaagatgccctgcaatgcgatgcagaagctgagcgtgaggtagggctgcatgttctcgtgaggttgcgagccaccggcattgccgacggtgctcccgaccagcgtcgtcagattgctgggcgtggtgtagagattggccgactgcgccatcagattgttggtgagcaccgcattgtcggcggggttggtcgtgccctggaagatgtgggggtgctgcggcatctcggaggtcgtcagcgtgtgcgtcgtctcgccgccggtctggcccagcgtgaagccggagcccatatggatcggcaccttgccttgcagattgggcagcccgaaggtggtctggccattgccgccataggtcgtgccgagcagcgagaacaaggcctggttctggttgattggcatcagctgaccgttgcagaacgcccagcctttcggcgggaagctgaacgacatcatcttgatttccgagagaaacggctgggacatcgatcctccgtcagacgatctgtctcgtcagtgatgcaatgaataaaatgcaaggcaaatgcggtcgtgcgacagcgaaatgcacgatagcgtgttttgcgccaagtgcaacctcaacgatcatatgagttctgtgattttttgtttagatgcgtgacacatggatgtcgtcgcgatgacgtggagctttcgcaacccgcatcgatgcgtatgcgatccgatcaagatcgaaacgcctgccggatggtccggcaggcattgttcgagtcgccgcggcgttcgatcaaaccaccagatcgtgatgggtctggaggtgatcggtcggcgttccgcccatggcggcgaacgtcgcctcgtggccgacccaccaagggggcgcggcattggaaagcccgctgaacagatcggacaaggtctgtgtgttcgcgatcgggtccacatggtttgtggtggtctgcgacgacgtcttggtcaatgacgagaagtcgaagctatccccattgctcacgttgaccgtcgtcgtctgctgacccgaggtcgtcgtgtcttgtgccggcatggccttctgcaacgccaggttggattgagcgacatccgtagccgtgggcagtcggcgctcgccgtcggagaggccgatatacatcaggctgctggcatcggacggcgagatggaatcgggcaggccgagcacgtgaccgagctcgtgcaccacggtggtcagcagatcgagatgaccggccgcggcgctcgacggatcggtcaggagatcggtgccggcagcgttgacggcgtgggtgaactcgaaattgtcagcaggcgtcgggtcgatgaaccagccgcggccggcggcatcggtatcgatcgtgatatgcccggcgccttcctgtccgacgatctggccggagaggtcggcgatgctgaaggtcgcggcatgcagcagggcgagctgcgtcgcgttggcgcctgcgctcgcccattgcgcgatcgccgccgacaccaccgaggtgagctcatcctgcgtcaggtgcatctcgcccgtggtgggattggatgcctcgacgccacccgcctcggcaagcagcggtgcgaccaccgcgggaagcgccggcagcgtcgagaccagcgtcgtcaagccgttgccgcccgtggtgtcgacggtgatgccgcccgtggtgctgctgttgtcggcggtgatcacgccagcaggattgttcgccgtcgaaccgttcgtcgaaaggttcagatgggtgctgctgccgaagttgctcagctcgacgtcggtggcgtagagcgagctgtggttcagcgtgttcttgctgccggtgccgccggggcccatgccgatgacgatattcgtcgtgctggtgtcggcgggcgggcccgcggtggcgccattgtcgacgagcatggccgcaaacggattggtcgaggtcggggacgacaccgagttgccgtagaccgtggcgttcagggtcgaactgccgtcgttgttctgtagatggatgccattgtcgccgacgccggtgatggtgttgttttggatcagcgtggtcaggctgccattgccggcggtgcggacgaagatgccgtcggaattcgagttcacctgagcggggccgatctgattgctggcgatcgtgccggacatggtgccgttgtcctggcccttggaaacgaagatgcccgcggtgtcgaaggcgttggcgccgccgtcggtcaggatgttgtgcgagatgtcgaacgtggtggtcgcggcggagacgttgccgccggatccgctggcaatatggaccgccgttccgccgcccggaacgatggtttcgccgttgtggaacgtgttgctccggaccacggcgtccatcgacgaattgttgttggcaaccatcgcgatgaagtcggctcgcgtgccggcaaatgtgctgttggtcagcgtatagttggccgtcgcggagttgaagacctgcgcgcggacgttgtcgttgccggcggagccgaccaagccgaacgtgtcgctatccatcgtcaggcggttcagcgtgccgctggtgttgtagaggtcgacattctcgtcgaagccgccggaaatgctcgacccagtgatcgacgaggtaccgagcagattgtcgaaccggatgctgctctcttcctggttccccgcattattggtgccgttgacgccgctgatgctgccgctggcgaaggtgaatccggtgacgttgttgccgtagatcgcgaagttgctgaaatcgtgcagcgacatgtcggtgaacgacacgttggcggtgttgtgcaggaaaatacccgttccgccggtgcccgacgtggtttgcccgccggcatcggtgccggtgagaatatccgcgccggtcttgttgttgatggtgccgccggaacccgcgctcccggtgccggtgatatgcagcccgccggccgttcctgtcgtgtcgaggataatgccggcactgcccgacgagcctgtcgcggaaatgctcttgaaggtgagattgccggcgccgatgttggtgtgctcgacatcgagcgcggtgccggtcgtggacgcgatggtgttgttgctgccggtgacggtgatcgtgccgccatgggtgaagctcaagccggcgccgctggatgtcttgaccgtgatgtcggacatcgtgacggtgccgacattgttgccgtcgtcgctgatgccgataccggtcgaggccgaggtatcgatgttgacgccggtgatggtgtggcccgtggtgccgagcaggtcgatgccgttgtgagcgccggtgacctggatgaccggatcggtgccggaaccgacattggcggtgaccgttgcgccggtcaccggattggtgaactgcagcggatggctgccgccgatcaaattgacgccgttggcgagactgatgccgttggcttcgctgtaggtgccggtgccgtgttcgagcacgacgtagtcgcctgcgcctgccggattcgccgcgttgaaggccgcgatcgaggtgtacgggtcggcctgggtgccgaggttgtggctcgtggtggccgagttgtcgatgtagaacacatgcgggacgacgccgacgtggaaactctgcggtcccgacgtgagcgggccgccggtgccggtgtggtcgttgtcgttgatattcagcgtaacggtgtccgagccggtgaaaccgctgtcgctgttgtagttcagcgttgccagcgcggtgttgagctgcgcgatcgtgccggtgagcgtaacgctgtggctgccgttgttggtggaactggcaaggccggtggtgtcgaagatcaacgcgccgtggttggacgtgatcgttgcggtttcattgcggcctgcggaatcgatgtcgccgaccgagagccccgatatcgcgaggttggtgtgcgagaacgcggtgccgaccgacgaatccgacggcacggtcgcggttggcggatcgtcgatcgcggtgacggtctgggttgcgttcgccgaaccggtatcgtgaccgccattggcggtgccgccatcgtcttgtgcggtcacggtatacgagcgcaccgtggtatcggggggctcgccggtgttgttgaactgcacggcatcgagcacggcattgtagtgcgcgatcgtgtcggtgccggtcagcgtgacggtttcggtggtggccgtgctggtgatggcgaagtggatgttgccgatgtcgccgctcgagccggcgtggcccgcgatcgagagcgcgtcagaaggcttgaggtcgttcagcacgaaggtcgcgctgatcaaattggtgctgtcgacgtctgtaaccgtgaggttgggagcgatcgtgaccgggatggaactcgtggtcggcgtgccgaccggcggctcgctgaagttggtgatcgcgccgatcgtcaccaccggcgggttgttgaccggcgtgacattgatggtgtcggtcactggcgtgctgtcgacgatgccgtcgctggcgatgacggtgaccgtgcgggccagggccgacgggttgttgctggtgttgaaataggtcaccgcatccagcgccgcctgatagtgcgcgaccgtgtcgttgccggtcagcgtcagcgtgccgtgcacggcatcgaacgccccggtgatggcaccaatggggctgaaggcgagcacgtcctggccggcgaaatagttgccggtgatctggacggtcgcaaacgtcagattggccgagtcggaatcggtgacggtcaatgccgggtcgattgccgtcgcgggctgggcctcgaggtagttcagggtgtggcccgcggtgacgaccggcggggcgtccggaggcgccaccgtttccgaattcgaagtgccggtgatggcggcactcaccgtgtcggtcgccgtgatggtctggctgccggcggttccgaaggtctcgctgaaggtgccggtgccgttggtcagcgtcatgttggacggcagcacggcgtggccatcggtcgaggtgaagtgcaccgtgccggaatagccggtggcgatgttgttgtgggcgtccggcgcgacggtttcggtattcgaggtgccggtgatcgcgccgtgcgccgtgtcggtcgcggtgatggcctggctgcctgcggtatcgaaggtctcgctgaaggtggcgatgccgttggtcaacgtcatgtcggccggcagcacggcggcggcatcggtcgacgtgaagtggacggtgcccgaataacccgtgacgacattgttgaaggcatcgagtgcggtcaccgtgcccgaaccggccgaaccggccgttccgttggccgggatggccaccgcaaaatgggtgacggcgccggccgtgatcgtctcggcgttcgacgtgccggtgatcgtgctgtggaccgtgtcggtcgcggtgatggtctggctgccggcggtatcgagggtttcgctgaaggtgccgaccccgttggtcagcgtcacgtcggccggcagcaccccctgaccgtcgcgcgaggcgaagtgcacgtgatcgcaccgtgcgccgtgtcggtcgcggtgatggtctggctgccggcggtatcgagcgtctcgctgaaggtgccgaccccgttggtcagcgtcgtgtcagccggcaacacggcaatgccgtcggtcgaggtgaagtggacggttcctgtataaccggtggcgacattaccgaaggcatcaagcgccgtgacgatgatcgagcccggcgtccctgctgtgccattggcggggagactgacagaaaaatgcgtggcgacgcccggcgtcacgatttcggcattcgacgtcccggtgacggtgtgatcgaccgtgtcggtcgccgtgatcgtttggctgccggcggtatccagcgtctcgctgaagctgccgaccccgttggtcaaggtgacgtcggccggcagcacggcgtggccgtcgcttgacgtgaaatgaaccgtgccggtgtagttggtgacgacgtggttcagggaatcgagcgcggtaacggtgaccgagcccggcgtccccgctgtgccgttggccgggatgctcacgacaaagtgcgtggcggcgcccagcgtcaccgcgatcgtgaaggtctgtgagctggacagggtgccgtcgcttgccgtcgccgtgacggtgtaggcgtgaccgggagcggtcgtgtagtcgatcttgctgggatcggcgacggtgatcacgccggtgttggggtcgatcttgaagccgccgcccgaactatcgccggtcaggctgtaggtcaccgcattcatgtcggccgcgactaccgtgatgccgaccggtgtgccggcggcggctccttccgcgatcttgttggggactgcgttgctgtcgaccggcgtcgacggcgcgacgtcagtgaccgcgatgacgaagctctgcgagctcgtcgctatgccgtcgttcgcctgaaccgtgatggtgtaggcgtgacccgggctggtcacgtagttgactttggtggggtcggcgaccgataccacgccggtgttcggatcaatcttgaagccgccattggagctatcgccggtcaacgtataggtgacgggattgccactgctgctgacggcttgcgcggtaatgttgaccagggtgttggctgcggcaccttcgctgaccgtgccgcttcctggattggcgtcaaccggcgtcgccagcgattcggtgaccggcggccacggcgtgccgggaggacagccgaggtagagatattgcagaccatacgtgtcagcgaacgacaacgcggccgaatcgaggacgatatggccggtcgaatcgagctgaagttcggggcgagttaaaccaccgattgtataagcaggtatggtcgtcatgagcactcctgcgatcggcgtgcaagccgatcaagaattacatttgttgggaacgatgacgtgtgaagccgttcacacgctgaagttgaccgcttgcgacgggggtcggcaccaagccgcctgcaatacgggaaagccgcgatgtccgcggagccgtgacatcagcaagatcaaatgcgcttgccataacgtagtcgccttcacacactcgcgccgcgacaaaatacgatgaatgttcgagaaataggcggcggccaaaaaaattcatgctttggcaaccatgaccgtattggcgatacaaccgagtgtcaatgtgcgcacggatgacaaccgcgccattaacgacgattcctgtcctacagcgggaggtagagtgggggaatccggccggacgtgccggctgcggggcggaggtttccgtgccaaaagtcgagttcgacgtggtgtgacgaatctgtgatacgaattcgcgttgtgattgattaaggaccattcgtctgtgatctcgcgcgtccgataggccagccaatctgccccttttcgtcgtcacggtttcgcgagcgcgtcgtaaggctttcagactacgcaactattttcttgatccggcggccatcttgaacacactgaggggcggctacatctgtgacgtccgccgccgcggcatcgcggtggtccatccgcgttgaaacaccgcaaattcagttgcgactttcgtagccctgcattggtcggcgtgcttcgtggtcttttgggggagagggaattgaggtcgattgacagaacggaccgtctggctccggtgagcggcgtcgggcgccattcgcttcgacgccaagcatcgcccggcctttggcgcggcctggcgccgctcgggctgctggccgcgctggcgctcggcggctgcgaagagaaggccgcgcagtcgcagaccgcgcccccggcgccgcccgtgaccgtcgcgcagccggtcaagcgcaccgtcaccgactgggacgaattcaccggccgcttcgaggcgatcgaggaggtgcaggtccgcgctcgcgtcggcggcttcgtcaacagcgtcgagttcaaggacggtgcgatcgtccacgccggcgatctgctctacatcatcgatccgcggccgttcgaggccgtggtgctgcaggccgaaggccagctcgccgacgcgcgggccaagggtgagcttgccaagcgcgatctcgagcgcgggctcaacctggtgcagaccagcgcggtctcggagcaggtcgtcgaccagcgccgtcaggcattgcaggcggcgcgcgccgccgagacgcaggccgagggctcgctgaaggccgcgcagctcaacgtcgagttctcccacgtgctggcgccgatcaccggccgcgtcagccggcatctggtgacccccggcaacctcgtgcagggcagcgagggcggcgcgacgctgctgacctcgatcgtgtcgcttgatccgatctacatctatttcgacgtcgacgaggcgacctatcagcgcaacagcaagctgtggttcgaaggccggcgcccgagctcgcgcgatacggcgaacccggtgcaggtgacgctgaccggcgagaccaagccctcgcatgagggcaagatggacttcatcgacaaccgtctcgacgtctccactgcaacgctgcgcagccgcgcggtgattccgaacaaggacctgtcgatcctgcccggccagttcggccgcgtccgcctgatcggctcctcgccctatgaggcgctgctgatcccggataccgccattgccaccgaccagtcgcgcaagatcgtgttcgtggtcaaggacgacaacacggtggaggcacgcgcggtcacgctcgggccgctggatgacggcctgcgcgtgattcgcgagggcctcaagccggaagatcacgtgatcgtcgacggactgcaacgcgcccgcgtcggcgccaaggtgacgccgaaaatggcccaggccccgacgggtgacaaagctcccgcagatgccaagccggcggcaggtgcgaagccatgaatctcggaaggctttccatcaaccagcccatcctcgcgatggtgctgtcgatcgtgctgctgatcgtcggcgcgatcgcctatccgacgctgccgatctcggaatatccgcaggtggtgccgccgaccgtcgtcgtcaccacgcagtatccgggcgcctcggcgcagaccgtgtccgacaccgtcgccgccccgatcgagcaggagatcaacggcgtcgaggacatgctgtacctctacagccaggcgacctcgaacggccagctgaccatcaccgcgaccttcaagctcggcaccgacctcgacaaggcccaggtgctggtgcaaaaccgcgtcgcgattgcgcagccgcggctgcctgaagaggtgcagcgcaacggcgtcaccacgcgcaagaactcgcccgacatcctgatggtcgtgttcatgctgtcgcccgacgacacgttcgaccagctctacatctccaactacgcgctgctgcaggtgcgcgaccagctgctgcggctcgacggcgtcggcgacatccagatgttcggcgcgcgcgactattcgatgcggctgtggctcgatcccgaccggatcgccaatctcggtctgacctcggccgaggtgctggcggcgatccgggcgcagaatttgcagatcgcgggcggccagatcgccgagccgccgatcgccgatcgcgcgttccagcccaacctcgtcttcaccggccgcctcaaggacatcaggcagttcgaggacatcgtggtcaaggccggctccgacggccgcaccgtgcggctgcgtgacgtcgcccgcgtcgagctcggtgcactgtcctacgcgaccaacagcttcctgctgcgcaagtccgcggtcgctctgctggtgacgcagcggccgggatcgaatgcgctcgcgaccgccaagggcatcaccgacacgatggagcggatgaaggcgggcttcccgaaggggctcgactacaatatcggctacaacccgaccgaattcatcgcccaatcggtgcatgagctgatcaagaccatctacgaggcgatggcgcttgtcgtcatcgtggtgctggtgttcctgcagggctggcggcctgccatcatcccgatcatcgcgatcccggtgtcgctggtcggcaccttcgcggtgatggccgcgctcggcttctcgatcaacaatctgacgctgttcggcctggtgcttgcagtcggtatcgtggtcgacgacgccatcgtggtggtcgagaacgtcgagcggcatctcgagcacggcatgtcgaggcgcgacgccgcgctgaagaccatggaggaggtcggcggcgcgctggtctcgatcgcgctggtgctgtgcgcggtgttcgtgccgactgcgttcctcggtggcatctccgggcaattcttccagcaattcgccgtgaccatcgcggtcgcgaccgcgatctcctgcttctgctcgctgacgctgtcaccggcgctggcctcgcagatcctggtgccgcacgaggagaagcgaccgccggcacgctggaacatcatcgcgcgcggctgggacagctttactgcgctgttcaaccgggtgttcgaccggctggcccatggctatgctggtgtcgccgacttcgtgatccggcacaccgtggtgatggtcgtgatctatctcgcactgatcggcagtgccggctggctgctggcgaccacgtcgcagggcttcatcccggcgcaggatcgcggctacgtcatcatctcggcgcagctgccgggcgcggcgtcgctggcgcggaccacggccgtggtgcgtgagatcgagcggatcgcgctggatacgccgggtatcgttcgcgtcgcggcgttcgccggcttctccggcgcgacgcgcacccaggcgggcaacgccgcggcgctgttcccggtgttcgacgagcccgaggcgcgcctgaagaaggggctgacggcgaacgcgatcaccgccgagctgcgcaagcggctggcggtgatccagggcgccttcatcatcgtgattccgccgccggccgtgcccggcatcggcaccggcggtggcttcacgatccgtgtccaggaccggcaggggcgtggccccgaactgctggcgtccgcgaccgacgagctggtgcaggccgcgcgcaagtcgccgagcctcacatcggtgttctcgccgtattctgcgaacaccccgcagctgttcgtcgatatcgaccgggtcaaggcgcagaagctcggcgtgccgatcgccaacatcaccgacacgatcgagacctatttcggctcgacctatgtcaacgacttcaacctgttcgggcgcacctaccacgtcaccgcacaggctgacctgccgttccgcaaggaggccaccgacctgtcgcggctgcggacccgcaacgccaatggcgacatggtgatgctcggcagcgtggtcgacttcaaggacatttcgggccccgaccgtgtcgcgcgctacaatctctactcggcgtccgaactacagggtgagccggcgccgggcgtcagctcaacgacggcgctcaacaccatcaagaagatcgccgacgagaccttgccaagcggcttctcgttcgaatggaccgacctgtcctatcagcaagtcaacggcgccaatgccggcctctacgtgttcccgatctgcgtgttgttcgtctatctcgtgctcgccgcgcaatatggcagctggaccctgccgttcgcggtgatcctgatcgtgccgatgtgcctgttcgcggccacgatcggcgtgcgcatcatgggccaggacgtcaacatcctgacccagatcggcttcgtggtgctggtggggctcgccgccaagaacgcgatcctgatcgtcgagttcgcgcgcgacatcgagctcgagggtaggccgcggctggaggcagtgatcgaagcctgccggctccgcctgcggccgatcctgatgacgtcgttcgccttcatcctcggcgtgctgccgctggtgctgtcgaccggctcgggctcggagatgcggcaggcggtcggcgtcgccgtgttcttcggcatgctcggcgtcaccctgttcggcctcgtcttcaccccgatcttctacatggtggtgcgcaacctcgcggaagggaagaacgagggcaagccgaaggaaacggctgctgcggcggggtgagccatgatctctcttccgtcattccggggcgccgcgtagcggcgagcccggaatccattcatccacctggactgcggcccgatggattccgggctcgcgctgcgcgcgccccggaatgacaggggtaaggcaccgcaagcccatacttttggctgaactgaaatcgatgggcaggcgccgggttataaaataatgtcgcgtcgatttttcctgatcaaaaaactgctgggagagcataacaatgaagtcgggatttttggccgcggtagcggcgtgcagcctgatgctggcggcgccggcgatggcccagggtgtcaagatcggcatcctgaacgaccagtcgggcgtctacgcggattacggcggaaaatactcggtcgaagccgccaggatggcgatcgaggatttcggcggcgaggtgctcggccagaagatcgagatgatcaccgccgatcaccagaacaagcccgatctcgcgacctcgatcgcgcggcgctggtatgacgccgatggcgtcgacatgatcaccgagctgacaacctcgtcggtggcgctcgcggtccaggagctctcgaaggaaaagaagaaggtcgacatcgtggtcggcgcagcgacctcggcgatcacgggcgcggcctgcacgccctacggcttccactgggcgttcgacacccatgcgctcgcggtcggtaccggcggcgcgctggtgaaggccggcggcgacagctggttcttcctcaccgccgactatgcgttcggctacgcgctggaaaaggacaccagcgagatcgtcaccgctgccggcggcaaggtgctgggctcggtgcgcgtgccgctgaactcgtcggacttctcctccttcctgctgcaggcacagagctcgaaggcgaaggtgatcggcctcgccaatgccggccaggacaccaccaactcgatcaagcaggccgccgagttcggcatcgtcaggggcggccagaagctcgccggcctcctgatgacgctcgccgaggtgaacggtctcgggctcgaggccgcgcagggcctggtgctgaccgaggggttctactgggatcatgacgacaagagccgcgccttctccgagcgcttcttcaagcgcaccggacggatgccgagcatgatccacgccggcacctattcggcgacgctgagctatctgaaggcggtgaaggccgccggcaccaaggactcggatgcggtcgccaagaagctgaaggagctgccggtcgacgacgcctttgcccagggcaaggtgcaggagaacggccgcatggtccacgacctgtatctgttcgaggtcaagaagccgtcggaatcgaagaagccgtgggactattacaagcagctcgccgtggtgcccggcgaccaggctttcccgaaggccaaggactcgggttgcccgctgacgaagtgatgcgtcgctggggcaacaagtatcggtgtcgtcccggcgaaagccgggacccataaccaccgatgttagctaccctgctgcgctgtggccccagcccaaaactggttgctgtggttatgggtcctggctttcgccaggacgacagcggtggttgtggcgcgatcgcgccttcaatgcgccagacgccacgc

SEQ ID NO: 21 - DNA, 133023 bp, Bradyrhizobium enterica
cggcggcttccggccaggatacaatgtgcaggtggcgagcgcggccggcgagcagatcgtggccgggctcgacgtgaccaatattggttccgatcgcggcctcatgcagccaatgctagatcgcttgcgcgcgcggaccggccgccttccgggccgccatctcgttgatggcggctttggcagtgccgaggacatcgagtgggcgcatgatcaaggggttgaggtctattgtccgcccacgcaatccaagcacggtaccgatccctacctgccgcggcgcggcgacggcccgggcgtgttggcttggcgggcacggatggcaagcgagccgggcaaggcccagtacaagctccgatcgatctgcgagtgcatccacgctcgatggcgcaactggggcctgcggcaactcaccgtacgcggccttgaaaaggtccgtgccgtcgcgctctggttcgccctcaccaacaacgtcttacaagggcatcggctctacagcgcttaaacaccacatcggccacccggccgcagctgcgcaaaaaaccaaacccacccgacctacagacgtaaaaggcaaaacccgaaagcttcacaagctgtcaggatgacgggtttactgacggcgtacagacaatccgcatcgtcgtcctggcgaaagccaggaccatacgccgcggcctcaggaagaggcatgcggctagatatggagcctgcaactgacttcggtggttatgggtcccggccttcgccgggacgacaattagttatgcggcttcgtccgcgtgccgaagatcgccgaacccacccgcacgtgggtggcgcccatcgcgattgccacggggaaatccgcgctcatgcccatcgagagattcttcaagccattgcgcgcagcgatcttggcgcagagcgcgaaatgcggagccggcgcctggtcgaccggcggaatgcacatcagtcccgagatcggcaaatcatacttttcgcggcacgccgcgatgaaggtatccgcatcctgcggcgcgacgccggccttctgcgactcctcaccggtattgatctggacgaacagttccgggcgcttgccctgatttttgatttccttggctaacgcttcgcaaatgctggcgcggtcgaccgaatggatcgcatcgaacagcgcaaccgcctccttcgccttgttcgactgcaacggcccgatcagatggagcagcacgcccggatgagccttgatcagctccggccacttgcccttggcctcctgcacgcgattttcgccaaatacgcgatggccggcgccgataatcggcaaaattgcgtcggccgcgaaggtcttcgacaccgcgatcagcgtcaccgacgcgcggtcgcgccgcgcttccttgcaggcatgcgtgatcgcctgctccacggcggcgagaccatgtggtgaatcagccgataacggcgtggtcgggctttgcgtcatgcttgtgccgttctctgacaagatgcgggggttggctcgaattttaccaaattcgggaaaggctttttgaagccctgcattctaccttgcgcgcgggcaagggaatagaatgtcgggcgttactttcaaccgcaaccgggtcaggctcaagaaggttctgggtattcgtgcccggctcgccctgcttgcggtgatgctggtcgcgccgctgatgctcgatcgcgtccgcaccctggaagattcccgcagcaagcagatcgcgcaggccgccgccggctatgccaacctcaccgcgcacgccgccgagacccagcgcgaggtggtctcctcggtcgagaccatgctgaaatcggcggcctatatccgcgcctccagcggcattgggcagagctgcgaggtgctgcgcgccagcctgccgacggtgctgccctggatccgcagcatcatgttcgtctcccgggacggcgtcgtgcaatgctcgacgctcaacatgcaggtcgggctcaatctcggcgatcgcgaatatttcaagaaggcgcaggacaaccgtggcttcgtgttcagcgactatctgcgcggcaggaccaacggccggccgatgatgatggccgcctatccggtggcggcgatcaatccggagcaggatgccgtcgtggtcgccggcatcaacatcgactggctgtcgcagatcatggccaatctcggcggccagcccggcatgtcggccgtgctggtggacagcaccggggtggtgatcgccgctccatcggatcatgccagcctgatcggccactcgctcgacaccatccctctgatgtcggcgattgccgagaaggcgctgagctacgacgagccgtccggcacggtgtcgttcacggccgccgatggcgcgcagcgcacgctgagtttcgcccgcatcgtcggaacgcagtcccgcctgatcgtcagcatggacgaggccaaggtaacagcggcgatcaaccgcgagatccgcaccgcctatctgcagctcggcttcgtctgcttgttcgtgctgctcggcgccctggtcggcgcggagcggctcgtcatccatccgatcgagctgatgaccggcatggcgcggcgattcggcgagggcgactggtcggcgcgcgtcgccaagcacaagctgccgtcggaattcgtcccgctggcgcgcgccttcaacgcgatggccgcgcagctcagccagcgcgagcgcgagctcgtcgagtccaacgaccgcctcaccgtgatggcctcgatcgacgcactgtccggccttgccaaccggcgcggcttccagagccggctcgatttcgagtggatgcgggcgcagcagtatgaatgcgaactgtcgctgatgatgatcgatgtcgatcacttcaaactctacaacgacacctacggccatcccgaaggcgacgcctgcctgacgcggatcggtgaggtgctgtccggaatcgccgccgacacgatgggcttcgccggccgctatggcggcgaggaattctgcctcttgctgccgaacaccgacgccgcccatgcgctcgcgatcggcgagaccgtgcgcaccgcggtgctcgggctcgccgtgccgcacgcgccctcgagccattgcgtcgtcaccgtcagcgtcggcgtcgcaaccacaaagccgaacgagacccagcgccccggcgacctgatcgaagccgcggatgccgccctctacgccgccaagcgccgcggcaggaatgccgtgatcgagcacggcttcctgcagacgctggatgaagccgggatggcgctggcgagctagctgcatcgccccgtgcaggtggagcatctgatccctcgcgccaacaggcagaataactgccggtgctctcatcgacacgcagcggatcgtacccaatttgtattccggattccgccgtgacctgtttcggatcccggtgcgccaccgctattaggtcaatggtgttgcccgatagccccctcgttccgaaattgccgggcgcccctctactcactatcgtgcggccatgctttggtcaaaactgcgttgagtgcttggcgggaacatcgacgccatgacgatgcgattcgcctcttttggtgacactggatcaggggacaggtcgccaccgcattcttgaaatgccctcggcaaaggcttgcgatggaaagggcaacgttcgatcaggccagggtgctcgcttttggcgacgctcggagcattgcgacctacgcggtcgaaatcctgatcatcgccgcgatttatggcggccttgccgaagccgcgcgactggttcccgcgatcaacccaaccgcgacaccgctatggccgccgaccgggcttgcgctcgcgctggtcctgctgcgcggctaccggatctggccggcgatcctgatgggggccgtctctccctacttcatggccgaccgatcgctgctggaacttggcaccgccgggaccggcagcctgcttgctgcatgtgccgggacatggctgatcgaccgttggtcgaacggtcgccagacgtttgccacgcctgtcggtgtcgcaaagtttgcaatcatttgctttgcgccgacgacgatcgtcagctcagccattgcctcggccggctctgcgctcgccaatgaatcgagcctctccgattccgtcggcgccggggtgacctggtggcttgcggacgctgccggagcgctggtgattgctccgctcatcgtgctctgggcgacgatgcccttccgcattccttccaaatggaagctgctggaatcgatcgcggtccccgctctcgccggcatcgtcggaatcgttgcttacagcccgctcatcggcagcgacctcatcagccccgacctcgacgtgctgctgccgcatcggagccttctgggctttctggctctactccccttgatctgggccggactgcgcggcgatcgacgcaccgtgtcgacggctgcgttcattttcgtcggcatggccgtatgggggttctcggtcgggaatgagccgtttccgaaaacggatccgaatggcgcactgttatccttgctcgtgctttcgatcagcgcatcggcagctcctcttgcgctggcagcggccattgcgacgcgccagaccgcggaagcccatctcctttctgtccgggaccaactgaacgatcaacttgaacggaaagccctggcgctcgacaacatcaggcggcatttccagacccttatcgaaggcgtcgtcgactatgcgattttcgcgctcgatcgcgagggacacgtcacgagttggaacagcaccgctcaaaagatcatcggctacagctcggacgaaatcatcggcaagcattttggaattttctatcggccggatgaacgccgcgcgggttcgcccgcacacgcgctggagacggcaatcgaaagaggcaagtacgacgtcgagggttggcggatcagaaagaatggcacgccgttcttcatcacgggctccgtgtcgtcgagccatgatgacgcaggaaacctgatcggcttcatcagtattctgcgcgacgcaaccgagcggcgcgacgcggaggagaagctggttcaggcccgcgaacagctcgcgatgtcgcagaagatggaggcgatcggcaaactgaccggcgggattgcgcacgacttcaacaatctgttgatgatcatcggaggcagcgcccagatcttcacgcgcctgcttgatccgaaactgcccaaagcaatcgaagccatccagaccgcggccaaacgcggcgagagcctcacgcgccaattgctgaccttctctcgtcatcagcatctcagcccgacggtcgtcgatctgaacgcgtccatcaagaacatgcggacgatgatcgagagctcactgcgcggaaacatcgtctacaacgagaacgtcggtgagggcatagcgtcggtcaaggtggacctcgccgagctggagctcgcgatcgtcaacatcgccgtcaatgcgcgcgatgcaatgccgagcggcggcacgttcaccttgtccgtccatgcggtgaccgcgaaccaggagaccggcggcgatcgccgcgcaaaggctttctttgccatcgcgcttggcgataccggcaccggtattccgccgaatcttctgtccaagatgttcgatccgttcttcacgaccaaggaggtcggcaaggggaccgggctcggcctgtcccaagtctatggcttcgcgcatcaggctggcggaacggtgacggcggacagcaaggttggtcagggaacgacgattacaatctatttgccgtcctgcgcagacgagcagaccgccagcaaagacctcgccgccgccagagcaaggccgagacagccgcagcggcagacggttctcgttgtcgacgatagccccgaagtggctgacgtcacatcctcgctgttcgagcatctgggctatgaaacgatctatcgggattcggccgaagcggcgttgaaactgctcgatgccggcaccaggatcgatctcgtcttcagcgatatcgtcatgccaggaaccatcgatggcgtcgggctcgcgagagaagtgcggtcacgctacccgggtttgccgatcgccctgacaaccggttacagcgatgccgcaaatgcagcaccgccgagcctgaagatcctccgcaagccgttcgacaccgaggcactcagggatttcatccaggatcttgcgcccccgagatcagcgcgatcatccgtcgtacctctagcatcaaacacgaccgacgctttgcgcagacattgacgccctcggctaagcaccggatcgcgtcgcgaaaatgcggaaccttgaccaccggcgaagctgtacattcggtgtcgtcctggcgaaggccaggacccattacccccgcggctgatgattgcgcgaagctggggccgcgacccctttcccaacaaacgcctgtggttatgggtcctggctttcgccaggacgacgggaagactgctggcggcgccccggcatgagcatttgccgggccccaagccgttgaccccatgggcgtttttgtggcctagtccgccgtccccggatgggacccgaaaatcaccgaaaaccctgcgatttcatgaccgccgaacgctacaacgcccgtgaatccgaaccccgctggcaagccatctgggacgaaaaggcgatctttgcctccaagaacgacgataagcggccgaaatattacgtgctcgagatgttcccctatccgtcggggcgcatccatatcggccatgtccgcaattacacgctcggcgacgtgctggcccgcttcatgcgcgccaagggtttcaacgtgctgcacccgatgggctgggatgcgttcggcctgccggccgagaacgccgcgatcgagcgcaaggtggcgccgaaggcctggacctacgacaacatcgccgcgatgaagaagcagctgcggtcgatcgggctgtcgctcgactggtcccgcgagttcgcgacctgcgaccccagctactacaagcatcagcagaagatgttcctggacatgctggctgccggcctcgccgaacgcgagaagcgcaagctgaactgggacccggtcgacatgaccgtgctcgccaacgagcaggtgatcgacggccgcggctggcgttcgggcgccgttgtcgaacaacgggaaatgagccagtgggtcttcaagatcacgaagtacgcgcaggagctgctggacgcgctggatggtctcgaccgctggcccgacaaggtgcggctgatgcagcgcaactggatcggccgctccgagggcctcttgatccgcttcgcgctggatccggcaaccacgccggccggtgagagcgagctgaagatcttcaccacacggccggacacgctgttcggcgcaaaattcatggcgatctcggcggatcatccgctggcgcaggccgctgccgcgaagaatcctgatctcgccgcgttcattgccgacatcaagaagatcggcaccgcgcagtcgatcatcgacaccgccgagaagcagggcttcgacaccggcatcaaggcggtgcatccgttcgatccgagctggaagctgccggtctatgtcgcgaatttcgtgctgatggaatacggcaccggcgcgatcttcggctgccccgcgcacgaccagcgcgacctcgacttcgtcaacaagtacaatctcggcaacgtcccggtggtctgccctgaagggcaggacccgaagacctttgtcatcaccgacaccgcctatgacggcgacggccgcatgatcaattcgcgcttcctcgacggcatgaccatcgaagctgccaaggaagacgttgcgaaacggctggagagcgaagtccgcggcaacgcgccggtcggcgagcgtcaggtcaatttccgcctgcgcgactggggcatttcgcgccagcgttattggggctgcccgatcccggtgatccattgccccaaatgcgacgtggtgccggtgccggacgatcagttgccggtgacactgccggaggacgtctccttcgacagaccgggcaacgcgctcgaccatcacccgacctggaagcacgtcaactgcccgaagtgcggcggcaaggcggtgcgcgagaccgacacgatggacaccttcgtggactcgtcctggtacttcgcgcgcttcaccgatccgtggaacgagaccgcgccgaccacgccggcgatcgccaaccggatgatgccggtcgaccagtacatcggcggcgtcgagcacgcgatcctgcatctgctctacagccgcttcttcacccgcgcgatgaaggccaccggccacatcgacatgtcggagccgttcgccggcatgttcacccagggcatggtggtgcacgagacctaccagaaggccgacggcagctgggtcaccccggccgaggtgaagatcgaggttgatggtaacgctcgccgcgcggtgctgctggcgaccggcgaagacatcgagatcggcccgatcgagaagatgtctaagtcgaagaagaacaccgtcgaccccgacgacatcatcgcgagctacggcgccgacgtggcgcgctggttcatgctgtcggactcgccgccggaccgcgacgtgatctggagcgacgagcgggtgcagggcgccgcccgcttcgtgcagcggctgtggcggctggtgaacgaatcggcggagatcgccaaggcggcgccggcggcccggccggcttcgttcggacccgaggcgcaggcgctgcgcaaggcggcccatggcgcgctcgacaaggtgtcgtccgggatcgagcggctgcatttcaacgtctgcctcgcccatatccgcgaattcgccaatgcgctggccgaagtgctggccaaaggcgacaagccggcgccggatgtctctccggacgttgcttgggccgtcaaggaggctgcgacgatcctggtccagctgttctcgccgatgatgccgcatctggccgaggagtgctgggtggttctgggccgaaccgggctggtttccgaggccgattggccgcaaatcgagcgcgatttgctggtcgaagacagcgtgaccctggtcgtccaggtcaacggtaaaaaacgaggtgatgtcaccgtgccacgcaccgcccaaaatgcggagatagaggctgccgttttggcgctcgatgcggtaaaagccgccttggacggcaaacccgtccgcaaggtgatcgtggtgcccatgaggatcgtcaatgttgtcggctaggatcaggatcgccgcccggtttgtagccgtggccgccttggccgcgctgacggccggatgcttccagccgatgtatgccgagcgcaccctcgacggttcgcccgcgctgcgcgaaaagctgatgggcgtcgaggttccgccggtcgacaagccgaatgcctcccgcgaggcccgggtcggcgtcgaggtccgcaatgccctcgccttcaagctctacggcaccgccactggcatgccgccgacgcaccggctggtgctgcgcttcaccaccagccgctcctcgctgatgatcgacccggccaccgcgctgccgagcagcgagaactatggcgtcgacgcccagttcaacctgatcgagatcgcctcgaacaagtcggtcatgaccggtaccacgttctcgcgcgtatcctatgacatgccgggctcctaccagcgcttcgctcgcacccgcgccctgcgcgacgcagaggaccgcgccgcgcacgagatcgccgacaatatccagacccggctcgcctcgttcttctccagcgggacctgatcgacgcattggtcgcacttcgcggaaaagagatcgacagcttcctcgcccggccggacgccggacgaccgatcatcctgctgtacggcccggacttagggctggtacgcgagcgcgccgacgcgttgatggcctccgcggtcgacgatcccaacgatccgttctcgctggtgcggctcgatggcgacgaactcgccgccgagccgtcgcggctggtcgatgaagcgatgacggtaccgctgttcggcggccgccgcgccatccgcgtccgcgccggctcgcgcaatttcgcaagcggcgtcgagacgctgaccgagaccgccgcgctgaaagactgccgcatcgtgatcgaggccggcgagctccggccggaatcgccgctgcgcaagatctgcgagcgcgccaagaacgcggtcgcgatcggatgctatcccgacaccgaacgcgacctgaccaagttgatcgaggaagagctccgcgtatccaacctgcggctggcgagcgatgcgcgcgcggtgctgatgtcgctgctcggcggcgaccgcatggcctcgcgcaacgagctgcgcaagctcgcgctgttcgcgcacggcaagggcgagatcacgctcgacgacgtcatgaccgtggtctccgacgcctccgagctgaagctcgacccgatcgtcgacggcgccttcgccggcaatgccgcgctggtggaaagcgagttcacgaaggcgatggtcgccggcacctatcccggcgtgatcatctcggctgcgcagcgccaggcggcgtggctgcacaaatcggcgctggcgatcgcggacggcacgccggcatccgcggtgctcgaaggcggatttccgcggctgcatttctcgcgcaagcccatggtcgagatcgcgctgcgcaatttcaccccgccgcggctggtgaccatcatcgatcagctcgcgaccgcggcgctcgacatgcgcaagcaggcttcgctcgccgcggtgatcgggcagcgcgcgctgctctcgatcgcggcgaacgcgaagcggcggggatagccgggacgtcgcaaccaccgtcattgcgaggagctcgcgacaaaattgcgaaagcaattttgcgctgaagcgacgaagcaatccatcgctccgcacatgcagagaaatggattgcttcgcttacgcccgcaatgacgtggagagatgtcggatgagctaaccgccctcgagccgccgcaccacttcgtcgagctgctcgaggttgcggtagttgatctgcacggtgccgccgggatcacgatggctgacggtgacggcgaggccgagcgcatcgctgacgcgcttctccagcgccagcgtatcggcatccttgtcgaccttggccgcgctgccagaacgcgccttctgcggcttgcgctccggcacgccctcctcatgcgccagcgcctcggcctggcggacgttgaggccctcggcaacgatgcgcttggcggcagccagcggatccggcacgccgatcagcgcacgggcgtggccggcggagagatcgcccttggagatcagcgcctgcacctcgctcggcaatttggtcagccgcatcatgttggcgacatggctgcggctcttgccgacgatcttggcgatctcttcctggctgcgtttgaactcgtcggcgagcgcgtgatagcccagcgcctcttccatcgcgttgaggtcttcgcgctggacgttctcgatgatcatgatctcgagcgcgtcggaatcggagacctcgaccggcacgatcggcacttcatgcagaccggcaagctgcgaggcacgccagcgccgttcgccggcgatgatctcgaaacggtcctgcgcgcccttgatcgcgcgcaccacgatcggctggatcacgccgcgcgccttgatcgaatcggcaagttcgccgagctcggcatcggcgaagctgcgccgcggattgcgcgggttgggtttgaggaattcgatcggcaccttgcgctgcgtgcgcggccgctcgacatgcgcggccgcctcgccgccgacgtctccgatcaggcttgccagcccgcgccccagtcgcgaacgcgcttcatcggccattgttgcgagctcccttggattcacacgcagtactccgaacttcgatatctggattgtaggatgggcagagcgcagcgaaacccatcattctcgttcagtgccgcgatgggtatcgcttcgctccacccatcctacacatcgccctcaatgcgcgcgcagctcgcgctcgcgctggatcacttcggtggcaagcttgagatacgcgtcgctgccggcgcatttgagatcgtaaaccagcaccggcttgccgtaggacggcgcttccgagatccgcacgttgcgtgggatcatggtgtcatagaccttgttgcccatgaactggcgcacgtcggcaaccacctggttggagaggttgttgcgcgagtcgaacatggtcagcacgatgccgtggatcgacagggtcggattgagcgtcgagcgcacctgctccaccgtctgcagcaattgcgacagaccttcgagcgcgaagaactcgcattgcaacggcaccaggatcgcgtccgacgcggccatcgcattgacggtaagcagattgagcgagggcgggcagtcgatcagcacgtaggtgtaatcggagtccggcgagacgttgttgttcaatcctgcgatcgcgtcgcgcaaccggaaggcacggcccggcgtggtgccgagctcgagctcgagaccggagagatccatggtggatgccgcaatgtgcagccgcggcactgcggtcgcgactacggcatcgcgcagcggcgcttcgccgatcagcacgtcgtaggtcgagcagctgcggttgcggcgatcgatgccgagaccggtcgaggcgttgccctgcggatcgagatcgacgatcaggacgcgctcgccaatcgcagcgagtgcggtcccaagattgatcgctgtggtggtcttgccgacgccccccttctggttggcgagcgacaggatgcgcggatggcccggcgcttggagcgccttatccccttgataaacctcgtccatcacagtcataccaaaataccatttgctcttgcggagtcccctagcgccgctcgattgacccgagttcgacgatccagccctgtccgccggtccggctggcgtgtagctttggctcaatagtccaatatttagtggcctcggtcaattcggcctctacatcttgacccttcaaaaacagcgccttggcgccctttttgacccacggctccgcaaagccgatgagttgatgtaacggagccagcgcccgtgcggtgacgcaatcgatgggccccgcgattctatccacagtatccccgatatcagccagatgcaccgtcccaggcgacgccgtgacgcggacagcctcacgcaggaacgcagcttttttggcaattcgctcaaccaagtggatggacgcgccaggcgtctcagccaatgcacaggcaagcacgacgccggggaagccgccgccgctgccgagatcgacccaggacttcgccgtcggcgcgagactcaggagctgaagcgaatcggagatgtggcgggtccagagattcggcagcgtggacggcgcgacgagattggtcttggcctgccactccagcaggagagcgacgtagcgatcgagccgggcttccgtttcacgtgaaacaggagtcagcgcgagtgccgcggctttgtcagctgcggagatttcgaggtctgcggaacgggaaattgaagccattctcttgaatgccaggttggtgttcgtcattgcgagccaacgggtcgcgcttaggctccccgatgacaggctccacgaagcgatccatctcacagctcgcgcagacatggattgcttcgtcgcttcgctcctcgcagtgacggcgtgaggccgcgctgtttcacgtgaaacgtcaggcgctgaccttggccgatttccgtcgcgcctcgcgtcgcagataggccgccaggatacccaacgccgccggcgtcatgccgtcgatccggcccgcctgcccgactgttcgcggctgcgctttctgcagcttggcgcgcgcttcgttcgagagaccgggcacatcggcgtaatcgacatcggtcagcaccaggccctcgtcgcgccggaaggcatcgacgtccgcggtctggcgcttcagatagacatcgtatttggcgtcgatctcaagatggaccgcgatcgccgggtcaatggccgacagctccggccagatcgcctggaccgccggccactcgatctccggataagccagcagctcaaaggccgagcggcgatggccgtcgcgattgagcgaaagcccgtgcttggcggcctcgttcggtgtgatcgccagcgacttcgccagtgtcttggcggcgtccagggctgtcatcttggtcctatgacgctccgcgcgcgccatcccgacgcatccgagcgcgatgcccttgtcggtcagccgctggtcggcgttgtcagcccgcagcgtcagccggtattcggcgcgcgaggtgaacatccgatagggctcggtgatcccccgggtcacgagatcgtcgatcatcacgccgagatagccgtccgcgcggtcgaacacgatcgggtcggcgccgccggccgccagggcggcgttgaggccggcaacgatgccctgccccgccgcctcttcgtatcccgtggtgccgttgatctggccggccaggaaaagcccacgcagccgcttggtctgcagggtcggatcgagctcccgcggatcgacatgatcgtattcgatcgcatagccgggccggaccatcttcacccgctcgaggccggggatgctggcgaggatcgcgagctggacctcttccggcagcgaggtcgagatgccgttgggatagaccgtgtcgtcgtcgagtccttccggctccaggaagatctgatggccgtcgcgatcaccgaaacggacgatcttgtcctcgatcgagggacaatagcgcggtccggagctcttgatctggccggaatacatcggtgagcggtgcacattggcccggatcacgtcatgggtcgccggcgtggtccgggtgatgccgcactggatctgcgcggtcgtgatccggtcggtcatgaccgaaaacggctccggcggatcgtctccgggctgcatttcgaccgccgaccagtcgatcgtggtgccgtcgaggcgcggcggagtccccgtcttgagccggccgagcacgaagcctgcccgctcgaacgacgcggacagacccatggccggcgcctcaccgacccggcccgccggccaattcttctcgccgagatggatcagaccgcgcaggaaggtgccggtcgtgatcacaaccgcacccgcggacagctgccggccgtcgcccaggcgaatgccggtgacgcgcccctcgacgacgatcagctcgtccgcctcgccctcgatgacactgaggttcgcggtctcggtgatcgcggcctgcatcgcggccgcatatagcttgcggtcggcctgggcccgcggaccacggacggcgggacccttgcggcgattgagcatccggaactggatgccgccggcatcggcgacccggcccatcagaccatcgagcgcatcgacctcgcgcaccagatgacccttgccgagcccgccgatagcgggattgcaggacatcgcgccgatggtcgcgaaacgatgcgtcaccagggccgtctgcgcgcccatccgggcagccgcgctcgcggcctcgcagccggcatggccgccgccgatgacgatgacgtcgaatgagtctgccctggaagtcatggcgggacttctatcgcggagtgatgaaagccggaagaacgaagttgagatcggctatctgagacccgaccatctgagcgaaatatggattgatccggatcgctcgcaatgacgagctcgagctgtttcacgtgaaacaagcgcggtcacgtgaagcccaatgtttcacgtgaaacgcgggaggcgagttaaccaatccgaaaccatgtttaacgtgaaacaaaccggcctcagctacttcccgacgcagaactctcggaagatgacgtccaggatgtcctcgacgtcgacccggccgagcaaccgaccgagcgaatgggccgccctgcgaagttcctccgctgcgagctcctcgccctgcccgaccacgtcgatgctgcgctggagcgagtcgacagtctcctggagcaacccacgctgcctggtccggctgatcagaccgccttcgctgcttccaaaatagtcgtgcgcgaaaccgaccagtgcggcgatcagctcggacagcccatcgccacgagcggccgagatcctaaactcgggctgactgcctcgctcacccggcggggtcctgaccaagtcgatcttgtttcgcaccagccaggttggcaccccgccgctatgcccggccttggcgttgccattgtcggccagccacagcacgaggtcggcttccgcagcgcgggcccgggcgcggcggacaccctcctgctcgaccgggtcgttggtttctcggatcccggcggtatcgatgacggtgacgggatagccgtcgagatcaagctgcacctcgatcacgtcgcgcgttgtgccggcatgcggtgaaacgatcgcgacctcacgcttggccaactgattgatcagggtcgatttgccgacattcggcggaccggcgattgcaaccaccaggccgtcccgcagccgttcactttggccctgcccggcaagcacttgcatgatctcatcgtgcagcgcccggatccgctcaagcgccggtgcgatcagttccgcggggacatcgccctcgtccgagaaatcaatgccggcctcgatcagcgccgacgccgcgatgatccgctcgcgccagtcgcgcgcgcgatcgccgagcagccccttcagctgccgcaacgcctgccgccgctggcggtcggtgtcggcatggatcagatcgtcgagaccttccgcttcggtcagatcaagcttgccgttctcgaaggcccgccgcgtgaactcaccgggctcagcgggtcgaacatggtcgaatgccgcgatggcttcgaatatcgccgacagcactgcgcgtccgccatggacatgaaattcggcgacgtcctcgccggtcgcacttgccgggccagggaaccagagcacgaccgcatcgtcgatcggttggccgtccgaatcgcgaagcagcgcccgggtcgccatccgcggcgccggcctcttgcccgccaatcccccaatgaccgacgcgcccattgggccagacagcctgacaatggcgatcgcgctcggcggccgtccggaggatagagcgaagatcgtctggtcgcgcggatgcatcgcttatttcttcccaagccaatcggcaaaggcaatgccgctctcatttcgcacgcaatattgcaaaatgctgcaatgcaatatgatcgagaatcgttgcagccgccgcgcagcaattttgctgcggctcatccggcccaccccagaagtctatatcttaaatataaacaatatcagtagcttatatgaatattcggcgtaccggcggagctcgatttatgctgcaacttggtgcagcaaatccgcagcatgaaaaaaggcgccccgttttgcggagcgccctgttctcttcggctgcagcctcaggtgttcatggaatcgaagaattccgaattgctcttcgtgttccggagcttgtcgagcaggaagtcgatcgcatccatggtgcccatcggattgaggatgcggcgcaggacgtacatcttcttcagcacctgcggatcggtgatcagctcctccttgcgggtgccggagcgggcgatgtcgatcgccgggaaggtccgcttgtccgagaccttgcggtcgaggatcagttccgagttacccgttcccttgaattcttcgaagatgacttcgtccatgcggctgccggtatcgaccagcgcggtcgcgatgatggtcagcgaaccgccctcctcgatgttgcgcgcggcgccgaagaagcgcttcggacgctgcagcgcgttggcatcgacaccaccggtcagcaccttgccggatgacggcaccacggtgttgtaggcccggccgaggcgggtgatcgaatcgagcaggatcacgacatcgcggccatgctcgaccaggcgcttggccttttcgatcaccatctcggcgacctggacgtggcgcaccgcgggctcgtcgaaggtcgacgacaccacctcgcccttcaccgaacgctgcatgtcggtgacttcttccgggcgttcgtcgatcagaagcacgatcagatagcagtccggatgattggcggtgatcgagtgcgcgatgttctgcatcagcaccgtcttgccggtgcgcggcggcgccacgatcagcgcgcgctggcccttgccgatcggcgcgacgatgtcgatcacgcgggccgacaggtccttcttggtggaatcctcaagctccatgcggaaacgctgattgggaaacagcggcgtgaggttgtcgaaattgaccttgtgcttcgacttttccgggtcttcgaaattgagcgtgttgaccttcagcagcgcgaaatagcgttcgccttccttcgggctgcggatgtggccttcgatcgtgtcgccggtgcgcaggccgaaacggcggatctgcgacggcgaaacgtagatgtcatcggggcccggcagatagttcgcgtcgggcgaacgaaggaagccgaagccgtcggacagcacctcgacgacgccctcaccgataatgtcggtctcggcgatcgccagctgcttgagaattgcgaacatcagctcctgcttgcgcatggtgctggcattctcgaccccattctcttccgcgaaggagacgagctcggccggcgttttcgatttgaggtcctggagtttgatttcccgcatcggggtcgtcctgtgaggaagtaagtagggaaggggtgcgaggtggcttggaaaaagcggacgccaaaggaaggtccgcaggtctcagccaggaaagtgccgtttgggctttcaaacctgatgcggcgccggcccgaaaagaaccgaaacgcgaccacatccgcctgcgtggggtgggataaaacctatatagaaaatcgatccgtccttcgcaagaaggactgaagcatgcttcttgggcatcgcaatgtctagaacggcttcacgaccaccatgatcacgatcaggatcatcagaagcgtcggcacctcattgataatgcggtagaatttctgggttcgctgattccggtccgcggcgaagtccttcacgcagcgagacaaaaagccgtggatacccgacatggcgagcaccaacgcaaatttgacgtgaaaccagcccgataggtaccagtgtccggcccaggccagataaagcccggcaagccaggtcacgatcatcgcggggttgatgatcgcccgcaaaagccgccgttccatgaccttgaaggtctcggactgcttcgagccggcctcggcctcgcaatgatagacgaacagccgcggcagatagagcattccggccatccatgagatgacggcaatcacgtgcagcgccttgatccagtcgtacaacatcgcagcgatgcctttcagggaacagctcggcgggaaacagctcggacagcctcggcgttgcgaactaagctttgcaagcgagggacggatacatatccgcacacacggctctcctaaacctaattaattttagaatctaaggtttgagtcttagtggcggtgaatttgactcatgcaatacgatccagccgttcttgcgggcttgttcacatccctcaacattcaggccggcggcggccgttatccggaatctatccctcaactcaatctgttgcggacctctgtggccagcttatgaagagacaaatccacaccggttcactatcatctgtgcgatgacgtcgacttatccttttcggcggtgctgtgaagaaggggacgagatatacagggacctggcggcggacccggaatcttctcctcgacctccacagggattcacaggatagacaggggctctggtgccgacgacatccaattatttccacctccatctggtgtcggactcgaccggcgagacgctgatcaccgtggcgcgcgcggtcgccgcgcagtacgccaacgtcaccgcggtcgagcatgtctatcccctggtgcgtagccagaagcagcttgatcgcgtgctcgacgagatcgaggaatcgcccggcatcgtgctgttcacgctgctggagaaggacctggtcggacggctcgaaggcaagtgcagggagatcaacgttccgagcctgtcgatcatcgggccggtgatgcaattgttcgaggcgtatctgggtgctgcgacgaccgggcgggtcggcgcgcagcacgtgctcaacgcggaatatttcgcccgcatcgatgcgctgaacttcacgatgatgcatgacgacggtcagcatgtcgaaggcctcgaggaggccgatgtggtgctggtcggggtgtcgcgtacctcgaagacgccgacctcgatctatctcgccaaccgcggcatcaggacggcaaacgtgccgctggtgccgggcattccgctgccgcaccagctcgagaccctgaagaagccgctggtggtcagcctgcacgcgacgcccgagcgcctgatccaggtccggcagaaccgcctgctcacgatgggcgaccgcgacaacgacacctatatcgacaagcagtcggtggcggacgaggtcgcctttgcccggcgcctgagcgcgaaattcaactgggcgctgctcgacgtgacgcggcgttcgatcgaggaaaccgccgctgccgtgatgaagctctataacgaccgccagcgcgcgcggccgtcggagtgatcgccaaatcatgagcatctggcgtggtccccaggagctgatcctcgcgtcgcagagccgtgcgcgacggatgctgctcgaaaacgccggtctcgccttcgaggcgttgccggccgatatggacgaacgcgcggtgcagaagaattccggcctttcggcgccgggcgaggtcgcgtcgctgctggcgcgcgagaaggcgctgttcgtctcgaggcagaaacctggtcaatatgtcgtcggcgccgatcagacgctggcgctgggcgaacggatgttcagcaagcctgccggccgcgcgcaggcagccgaacagctcggtcagttggcaggccggactcatgaactgcattccgctgtctcggtggcgcgcgatggaaagatcctgttcgacgatgtgagcgtcgcccggatgacgatgcgccagctcgctgccggcgagatcgaggcctatctcgaccaggccggggaggcggtgacgaccagcgtcggcgcctaccagctcgaagggctcggcgtgcatctgttcgagcggatcgaaggcgaccatttcaccattctcggcctgccgctattgtcgctgctcgcattcctgcgccgcgagaagctgctcgcggtgtgaaggtgccgaggcccggcgacggagagatgctgaaccgatgctgattttgggactgaccggctcgatcgggatggggaaatccaccacggccaaactgttcatcgaggccggcgtgccggtctacgacgccgatgcggccgtgcatcagctctatgagggcgaagccgcgccggtgatcgaggccgcgtttcccggcaccaccgccaacggcaaggtcgaccgcgcaaagctctcggcccgcgtggtgcaagacccggtggcgatcaagcagctcgagcagatcgtgcatccgatgctcggcgcatcgcgccagaaattcttcgccgacgcggaggcggccggcgcgccgatcgtcgtcctcgacattccgctgctgttcgagaccggcggcgagaaacgggtcgatgccgtcgtcgtcgtcaccacctcgccggaactgcaacgcgagcgcgtgctggcgcgcggcaccatggatgccgccaagctggaggccatcatcgcaaagcagatgcccgatgccgagaagcgcaagcgcgccgatttcatcgtggatacctcgcacggacttgatccggtgcgggcgcgcatccgcgacattctggccgaggttgttaagatgccgcagcggcgggcctgattcgcccgcgtttcggattacctcacgtcatgcgcgaaatcgttctcgataccgaaaccactggcctcgatccgctgcgcggcgaccggctggtcgaaatcggctgcgtcgagatattcaaccgcatgccgacggggcagacctaccacgtctacatcaatcccgaacgcgacatgccggcggaagcattcgctgtgcacgggctgtcgaccgagttcctggcctccaagccgctgttcaccgaagtggtcgacgagttcctggccttcattggcgatacgccgctggtgatccacaacgcctcgttcgacatcagcttcatcaacgccgagctcgaccgcatcaagcgcaaggcgattccgaaggaccggctggtcgatacgctgctgctggcgcggcgcaagcatcccggcgtgtcgaaccggctcgacgatctctgctcgcgttatcagatagacaattcccgccgcaccaagcacggcgccttgctcgacgccgagctgctggccgaggtctatatcgacctgatcggggcgcggcagtcgcagctcatcctggcatcggaagcatcggacgcccgcgcgggcagccacagtgatgcgccgcggcggcagcgcgagatcccgctggtcgcgcgggtcagcgaggtcgaccgggaagcccaccgagcctttgtcgccaccctgggcgacaagccgatctggaacgattatttgccgccgccggcagctgctgaagccccggcggcttgaaatctctggttacattgtgggctgtaactcttcgtcattgcgaggagcgcagcgacgaagcaatccatctatcccttctgggcacaatggattgcttcgctgcgctcgcaatgacgggggtagggtacccgatcagctcggctttgcgccggatgcggcctgggcggcggcctgccgttccatgttctgacggtagagaccgacgaagtcgacggggtcgagcagcaagggcgggaagccaccgtcgcgcaccgaggtcgcgacgatctcgcgggcgaacgggaacagcagccgcgggcactcgatcatgaccagcgggtgcaggttctccttcggtacgttcacgatccggaagacgccggcataggcgaggtcgaagctgaacatcaccttgccgccggtctcggccttgccctcgatcgagaggatcacctcgtactcgttctcggagaggttgttggcaccgacattgatctggatgttgatcgccggctgctgctgctgctgtccgagcgaggccggcgcgttcgggttctcgaacgacaggtccttggtgtactgcgccagcacgttgagctggggagcggcctgttcgacgggggcgccgttgccattggtcatgaaatgtctcctggagcagcgctcgatggacaggatgtccgacggcacgcgttgaggtttggaaatgccgatgccggcgagtggctatcataggcccggctcggtccacaaggacgacgagcgcgcacgccgcggggcgttgcggccaaatctccggcgaaggcttgtgagcacagctccgcccaatctcttaacggcttcctaaattattgaagatgcgcgatttccaggcaggaacgggtttccccccggggttaaaacgcgctacacttgcccgtgccaaaaagcgccattggccgggcatagtttcgtgcctacatgctgcggacttaatcggtgatctaatctctgccgttcccgaccgggaacgctttgatgtccggcccgttgccggcagagaccagaaagcgaattcgacgtggatatctacaccatcatcttcctggcgctggccgtatttatcttcctgcgcctgcgcagcgttctcggacagcgcaccggaagcgagcggccgccgtatgatcgtgcagcacccaacgtcctgcagcgcggccaggacaacaacgtcgtgccgatcccgggatcggtgatcgatcagccggctccggccgcacccgccgaaccggtcgagccgaccgaacgctggaagggtatcgccgagcccggcacggcgctggcgcagggtcttgatacggtcgccgcccaggattcctcgttcgatccgcggcatttcctctcgggcgcccgctcggcctatgaaatgatcgtgctggccttcgccaatggcgatcgccgtgcgctgcgcgacctgctgtcgaccgaggtctatgaaagcttcgaggccgcgatcaaggaccgcgagaagcacgagcagaagaccgagacgcggttcgtctcgatcgacaaggccgagatcgtcagcgcggagacgcgcgatcgctcgacccagctgaccgtccgcttcgtgtcgcagatgatctcggtcacccgcgacaaggcgggaaccatcgtcgacggcagcccggacaaggtcgccgacatcaccgacatctggacattcgcccgcgactcgacttcccgcgatccgaattggaagctggttggcactggaagcgctcactagacatctcagctacgggcgcctcgcgatcgcgtgttgcgcgctcgcggttgtgtgctccaccgcggcgatcgccgcgcgctacaggtcgagccggcacccgccgctccggcacgagcagtcccacccgatcccctatcccgatctggaattgccgctgcaggtcagcggcagccagtatgagccgctcgcctggaccaatgtcgccggctggggcgacgacgatcatctcgccgcctacaaggcgttccgcacgagctgcaagccgatcgcggcccagcagggcgcgccggcggaatcgaaagcgctcggcagctcgctgcgcgatccctgccggatcgccaaggggctcgagctcagcgacggcgtcaaggcaaaggaattcttcgagcagaacttcgtgccgctgcggatatcgcggctcggggaggaggccggcttcgtcaccggctattacgagccggtgctcgacggctcgaagacgcagaccgaggtctacaacgttccggtctaccgccgcccgtccaacctgttcgtgcgcggcaagacgcaagcctccgtcggcctgcccaacagcggtccggtgtaccgcaagatcggccggcgcaagctcgtaccgtattacgaccgcgcccagatcgaggacggtgcgatcgccggtcgcgggctcgagatcgcctggctcaagagccagaccgatctcttgttcgcccagatccagggttcggcgcggatcaagttcgaggacggcaccacgctgcgcatcaattacgacgcgcataatggctacccctatacgccggtcggacgcgtcctgatcgaccgcggcatcatcccgcgggagcagatgtcgatgcagaagatccgggagtggatggagcagaaccccgagggtgccaacgaggtacggcggcagaaccgcgcctatgtgttcttccgcgaggtgccgctgtcggacaaggacgaagcggtcggcgcgcagggcgtgccgctgacgcccggtcgctcgatcgcggtcgacaaggcgctgcatgtctacggcacgccgttcttcatcgccggccagctgccgatcgaatccgagctgtcgaagaccccgttccaccggctgatgatcgcgcaggacaccggatcggcgatcgtcggcccggcgcgcgccgatctctatttcggcgccggcgccgacgccggaaaggtctcgggccggctgcggcacaatatgcagttcgtgatgctggtcccgaaaggtctcgatcccgtcgcgcgcggccgcaagctgccgatccccgacgagcggccgtcggccaaaattgcgaagctgtttccgcagaccgatccgcagaaggacaagccggcggcgaaacctgctgacgcgccgacggggaccatcgccaaggccggcagcaaggacgcggccaacagcgccgccaggagcccggcggcgaaggacgccgcgcccgccgctgctccaacaacaacccctgtcgcgcaggccgcgcctgtggcagaaccagtgccgttgccggtcgcccggcctgacattccgcagcaaccggagaagcggcgcaccaggcgctatcgccatcaccgcgagcaatgaaacgacccgcgccgatccccgacctgtccgctccgtcgcggcgcaaacgcgcgctgagcgaggaggaacgtgcgctctgggagagcgtcgcgaaacaggtcaagccgctgcgcaagcgacccgccgcaccgaaggcccacgccgtcgcggctgatcccgccagccatcacgccgcggccaagccgattccggtcaagccaacggcacctgcaaaggccgtgtcgacaccgcgcccacagccgccgctggcgccgatcggccgccgcgatcgcgcgaaactgtcgcgcggcaggcaggagatcgatgcgcggctcgatctgcatggcatgacccagatgcgcgcgcatcgcgtgttgttcgccttcctgcagcgcgcgcactccgaggggctcaccttcgtgctcgtcatcaccggcaagggcaaggtcggtggtctcgagtccgaacgcggcgtgctgcgccgccaggtgccggaatggctcagcctgccggaattccgctcgctggtggtcggcttcgaggaagcgcatatcggacatggcggcgagggcgcgctctatgtgcgggttaggcgcgcgcgctgagcatgatccggaagatcagaatggacgcacgatcccgacgcgcgggatcagcgtgatgatccagccgagaattgtcgtcttgcgatcgtccgccgcgatcatcggcacgtccttcgacgccggcagcatcttcacggcgtgcagcatcaggaacatgcagaccgcccagttcgagatccagcgcgaatagtcgaacacggtcacgaacatcacgacatagccggcgcttatcatgacgagcgcggcgagcacgatgcggcgatgcagtttgctggctagcgcttcgatcaaccgcgagaaatagcgccacagcggcgcatgcagccagatcagcagcgcgaacaccggaatgccgaggatattcgagggcatccgcgcccaggtgtcggcgaactccttcgacagcggctggtaccagatgtagccgaactgcagcagatcggtccgcgatggatcggccatccggctttgcaggtggcggaggaattcgtcatagggcacgtcgacggtgccttcgaattgcgcgaccaggaacaggatgccgaccgcggcgagcgctacaagcccgacggcgatgtttcgcggcgtcgtgccctgcatcagatagaagcgcagcaccacgatcgctgcgatcgctggcacatacatcaggacgaagatgtgatgaaccaggatcagcacgatcgagaacagcgctgcaatcagcacgtacaggaccgagcgcgccgggatcagcagcagcacgatcgtcagcgcacagccatagatgtcgaaatggccgagcgtgtgcatgaagttcttcaggaagaacggcgacccggcgatgaacacgaacagcggctgatgcgcgtcgtcgaagccaaatgtgcggtgaaagagtttgaggaacagtccaagcgtcaacagccagatcgcgccggccagcgcgaacaccaaccacaccggcaccttgtcggtgaacagcgacacgatcgccccgaccagcgcgcgcttggtgaagccgtagtgatagtcgaccagcaagtggatgtaggggacgaagggcggcagcgcgatcttgtgcaggaacaccccgaccagcacggccgcgttgacggccagcatcaggcgccaggggttttgcgtcacccacagattcattgatcgcccactctcgtcgtcccggcgaaggccgggacccataaccaccgatggtagttttagaaggaatgtcggcccgagtcttggtcactgctgacttcgggggttatgggccccggccttcgccggggcgacgagaggctgcaaccgcctacaaaataaaccggctgagatcggcgttcttcgcgagatcgccgacgtgcttggtcacgtagtcggcgtcgacctggatggtctcgccgtggcgatccggggcggtgaaggagatctcgtcgagcacccgctccatcacggtctgcagccgccgcgcgccgatattctcgaccgtggaattgaccgccaccgcgacgtcggcaagcgcgtcgatcgcgccgtcggtgatgtcgagcgtcacgccctcggtcttcatcagcgcgacgtattgcttgatcagcgaggcctccggctcggtcaggatccggcgcatgtcgtcgcgggtcagcgcctgcagctcgacgcggatcggcaggcggccctgcagctccggcagcaggtccgacggcttggcgatgtggaaggcgccggatgcaatgaacaggatgtggtcggtcttgaccgcgccgtgcttggtcgagaccgtggtgccctcgatcagcggcagcagatcgcgctgcacgccctcgcgcgagacgtcgccgccggcgcggttctcgcgcacgcagatcttgtcgatctcgtcgaggaacacgatgccgttgttctcgaccgcgttgatcgcctcctgcaccagctggtcggtgtcgagcagcttgtcggattcctcgttgacgagaatctcgtgcgagccttccacggtcaggcggcgggtcttgctgcgtccgcccatcttgccgaagatgtcgccgagcgagatcgcgcccatctgggcgccgggcatgccggggatctcgaacatcggcatgccgctgcccgacgactgggtctcgatctcgatttccttgtcgttgagttcgccggcgcgcagcttcttgcgaaacgattcacgcgttgccgggctcgatcccgggccgaccagcgcatccagcacgcgctcctcggcggcgagctgggcgcgggcctggacgtccttgcgcttgcgctcgcgggtctgcgcgatcgcaacctcgaccaggtcgcggacgatctgctcgacgtcgcggccgacatagccgacctcggtgaacttggtggcctcgaccttgaggaacggtgcggccgcgagcttggccagccgccgcgcgatctcggtcttgccgacgccggtcggcccgatcatcaggatgttcttgggcagaacttcctcgcgcagggagccggcaagctgcagccgccgccagcggttgcgcagcgcgatcgacaccgcacgcttggcgtcggcctggccgacgatgaaacggtcaagttcagaaacgatttcgcggggggagaagtcggtcattggctctagctaggttgaaacaactgtctcggcaagcgccgttccgcgcctgttgtttgagcatgatcttttcggaaaaccgcttcgcacttttccggctcatgctttggttcatttgtcgcggaccatcaatagcgccggcccgtcaggcgtctcgaccatgccggcttcctggaagccggccttcgcataggcgcgcacggcgcgggcattgaccggattgggatcggcgacgatgcgcggcgcgccccgtgccagccgttcctcgacaaaggcgcggatcagcgccgagccgtggccaccggccatcatatccggttcgccgatgaagagatcgatgccgcgggtgcccacaggttgcacgccgaggccgcaattccattccgtcaggtcgtagcactgcaggtaaccaaaatcgttgccctcggcggcgacgatgaactggtccatcgccggctcgccgaggtcgccgctgaccagcgcgtattgctcagccggatcgccccaccactcccggacatgcggatgcgccagccacagcttgatcagtggcaggtcggccgtcgtcatcgggcggaaatgatagcggccggccatgctcagccgccgatcgtctcgatcgtcacgttgcggttggtgtagacgcagatatcggcggcgatatccagcgcgcggcggacgatggtctcggcgtccttctcggtatcgaccagcgcacgggctgcggcgagggcataattgccgccggagccgatcgccatgacgccggattccggctccaacacgtcgccggtgccggtcagcaccagggagacgtccttgtcggccacgatcatcatggcctcgagccggcgcagatagcggtcggtccgccagtccttggcgagctcgacggctgcccgggtcagttgccccggatattgctccagcttgctttccagccgctcgaacagggtgaaggcgtcggcggtggcgccggcaaagccgccgatcacgtcgcccttgccgatccggcgaaccttcttggcgttggccttgatcacggtctggccgatcgagacctgcccgtcgccgccgatcaccaccttgccgcccttgcggacggtgcagatcgtggtgccatgccagaccggcagctcgttttgggatgcttgcataggttacctctctcgggggcagatttaggtggtctgcaagagggttacaatcggccgatttggcgcggaatctcggtcaccataggccgaagttgggcacttttggcgtcatcccgcagtagcgaaggtgacatcagcctgttaaaagaccggcgttttcggcacgggaaagctcaatcttcatgcgcacggcaaccatcaagcgcaagaccaaggagaccgacatcgaggtgacggtcaacctcgacggggcaggcgtatccacggtttcgaccgggatcggcttcttcgaccatatgctcgacctcctcgcccggcattcgcgcatcgacatcaccgtgaaggcggatggcgatctccatgtcgattaccaccacaccacggaagacgtcggaatcgcgctcggccaggccgtcaagcaggcgctcggcaacatggccggcatcacccgctacgcctcgatccacatgccgatggacgagacgctgtcgcgcgtcgtgatcgacatttccggccgcccggtgctcgtgttcaaggtcgagttcccgcgcgacaagatcggggagttcgacaccgagctggtgcgcgagtggttcaacgccttcgcgatgaacgccggcgtgactctgcacgtcgagaccctatatggcgagaacagccatcatatctccgagtcctgtttcaagggtttggcgagggcgctccggaccgcggttgcgatcgatccgcgcgcccagggcgaagtgccctcgacaaagggtcagctcggcggctgatccgcgggagcatgaatccgggcacggtgccaccggttttcccggagatcatgcggcaagtaagagtccatcctcggcggagcgttcgatgccggtctatacagtgcatgcccccgtggcccacggcgccgatctcgcggtgaccgacaaattcgtcttcgtgcgcgacggcttccatgtctgggccgccgtcgcgggtgcgctctggctggcctggaacaggctctggctggcgctgatcggctggatcgtccttaccttcgcgatcgattatgcgctggccaagctcgggatcggccgcggcgcgatcgtgctcgtcgatctggtgttgatggtgctgatcgggctggaggccgcaacgttgcaacgctggacgctgtcgcggcgcaaatggcgccagctcgacatcgtgctcgccgacaatgtcgatgccgccgaacgccgcttcttcgagcgctggaccgcgcggcatcgcggcgtcgtcaacgaccagcgcgcggtcgatcgcggcggcccgccgccgacccgggatgttccgggtcaatcattctcaaaacccccgccgatgccgcagggcggcatcatcggattgtttccagagccaggaggatcacgatgaccgtcgcaatcatcgattacggctccggcaatctgcattcggcggcgaaggccttcgagcgcgccgcgcgcagcatggaggatccgcaagccatcaaggtgacgcgcgatcccgacgcggtgtatcgcgccgatcggatcgtgctgcccggtgtcggcgcgttcgccgattgccgccgcggcgtcgacgcggtcgacggcatgctggaagcgctgaccgaggcggtgcgggtcaaggcgcggccgttcttcggcatctgcgtcggcatgcagctgatggcgacgcgcggcaaggagcacgtgatcaccgaaggcttcaactggatcggcggcgatgtcgtcaagatcgagccgcgcgacgagaacctgaaggtcccgcacatgggctggaatacgctcgacatggtgcgcgagcacccggtgctggagcggctgccgctcgggccgaaggggcgccacgcctatttcgtgcactcctaccacctcaacgccgccaacgaggcggacgtgctggcgcgcgccgactatggcgggccggtgaccgcgatcgtcggcaaggacaccgcgatcggcacccagtttcaccccgagaagagccagcgcttcggcctcgctctgatctccaatttcttgaagtggaagccgtgattctctttccagcggttgatctgaagaacggccagtgcgtgcgcctggagcagggcgacatggcgcgcgccaccgtgttcaatctcgatccggcggcgcaggctgcaagcttcgccgcgcagggcttcgaatatctccatgtcgtcgatctcgacggcgcgtttgccggcaagccgatgaatgcccatgcggtggaggcgatgctgaaggcggtcactatgccggtgcagctcggcggcggcatccgcgacctcacaaccatcgaggcctggctcgacaagggcattacgcgcgtcatcatcggcacggccgcggtgcgcgatcccgagctcgtgaagggcgcagcgagaaaattccccggccgcgtggcggtgggcctcgacgcgcgcgacggcaaggtcgcggtcgaaggctgggccgagacctcgcatgtcaccgcgctcgagatcgcgcagcgtttcgaggatgccggcgttgccgcgatcatcttcaccgacatcgcgcgtgacgggctgcttaagggcctcaacctcgatgcgaccattgcgctcgccgaccgcatctcgatcccggtgatcgcctccggcggcttcgcctcgatcgacgacgtcaaggcgctgcttgagcctcgtgccaaaaaactcgccggcgccatcgtcggccgcgcgctctatgatggacgacttgatcccgccgccgcgcttcaactgatccgttccgcggtctaggagactgccatgttcaaggttcgcgtgatcccctgcctcgacgtcaaggacgggcgcgtggtcaagggcgtcaacttcgtcgacctgcgcgacgccggcgatccggtcgaggccgcgatcgcctatgacgccgccggcgccgacgagctgaccttcctcgacatcaccgccacccatgaaaaccgcggcatcatgctggacgtggtgcggcggacggcggaggcctgcttcatgccgctgaccgtcggcggcggcgtccgcaccgtcgacgacatcaagaccctgctgcgatatggcgccgacaaggtctcgatcaattcggcggcggtcagccgccgcgagttcgtcaaggaagccgccgagaagttcggcgagcaatgcatcgtggttgcgatcgacgccaaacgggtcaagcgcgccggcggctccgaccgctgggagatcttcacccatggtgggcgtaatgccaccgggatcgatgccatcgaatatgcccaggaggtcgtagccctcggcgccggcgaaatcctgctgacctcgatggaccgcgacggcacgcgacagggctttgatctgccgctgacccgggcgatcgcggacagtgtccccgtaccggtcgtcgcgtccggcggcgtcggcaatctcgatcatctcgtcgatggcgtccgcgagggtcacgccaccggtgtgctggccgcgtcgatcttccacttcggggaattcaccatccgccaggccaaggatcacatggtgcgcgccggcctgccgatgcggctcgatccctagcgcgtggctcggaaacacagtgatctgggactccttgtcacaaaaatgctaagtccccagttagggatggcaccttggcggtgccgatgcgcatgcttgagttgagttgatgtcgcgtttcacggtccacgatctggccgccaccatcgacgcccgcgctgcatcgggcggcgaggcgtcctatacccgcaagctgctcgacaagggcgcggagcactgcgccaagaaactgggcgaggaagcggtcgagaccgtgatcgccgcagtcgagaatgaccgcgatcatctcatcgcggaaagtgccgatctggtgtttcacctgctggttctcctgaaatcacgcggcgtgaagctggaggatgtcgaggctgcgctggagaagcgcaccgcgatgtccggactggaagagaaggcatcgcgcaagcgcgattgatcacgggagggcctcatggacatccgggcaccagatcaacagtacaacccctaccgcgtcttcacgcgccagcaatggtcgcatctgcgcgacgatacgccgatgacgctggagcccggcgagttcgaccgcctgcgctcgatgcacgaccgcctcgatctgcaggaggtcgaggacatctacctgccgctgtcgcggctgctctcgatctatgtcgatgccacccagcggctgtattattcgcagcgccagttcctcgcgatccgcgatcgcaagatgccctacatcgtcggcgtcgccggttcagttgcggtcggcaagtccaccaccgcgcgcgtgctgcaggcgctcttggcgcgctggtcgccgcggccgaaggtcgatctgatcacgaccgacggtttcctgtttcccaatgccgtgctcgagcggcagggcatcatgcagaagaagggctttccggaaagctacgacctgccgacgctgctgtcgttcctcagcgacatcaaggccggacggcgccgggtgcgcgcgccggtctattcgcatctgacctacgacatcgtgccgaacaaatgggtcgagatcgaccagcccgacatcctgatcgtcgagggcgtcaacgtgctgcagaccgggcggctgccgcgcgacggcaaggcggtgccgttcgtgtccgacttcttcgacttctcggtctatatcgacgccgacgaggccgtgctgcggaactggtacatcaagcgcttcctggcgctgcgcgataccgcgttcacggatccccggtcctacttccaccgctatgcgctgctgtcggacgaggaagccaccgcgaccgcgatcgcgatctgggagcgcaccaacctcgccaatctcgaggacaatatcctgccgacccgcccgcgcgcgaccctgatcctgaagaagggggccgatcatgtggtgcagtcggtcgcgctgcggcggctgtaattcttagccactcaagcttgccacatcacagctgtcgtccccgcgaaagcggggacccatagccacagctgtttgcgattcgcaggctgtggccgcaaccgatcgccaaactcgcttcagtggttatgggtcccggccttcgccgggacgacgcggaatttgcggcacctacgccgcgatatgccgccctgcggcgaggcccgcgagggcttcttccagcttctcgcggtcgagcggcttgatcaggaagccgtccatgccggcctcgaagcaggcatagcgatcttccaccatcgtgttggcggtcagcgccaggatcggcgtccggcgtccggacagcccgccggattcttgcgcgcggatctgcctggtggtctcgatgccgttgaggcgcggcatctggatatccatcagcacgagatcgtaaggcgtgccggccgatgtcgccgaaagccaggattccatcgcctgctcgccattggtcgtgatgaccacgtcgtggccgagccgcgcgagcagcgagcgcatcaggagcgcgttgatctcgttgtcttccgcaaccaggatcgagagccccttgcctgccggcgcggccgccggtgcggtcggcgcgggctcggtgacagcctcgatcacaaggcttggcgcggcgatttccggtgacgcggtcaggcgcgcggcgagcgacgatgcgcgcaatggcttgaccagatagccggtgaacatcgctgtctcgaaggccgcgaagtcctgccgcgtcgccggtgtgaccatcacgatgcgatgcgttgcgtggatgcgggccgcttcggcgaatgcctcgatcgcctgcgtgccgagcgtgtggtcgatcagcaccgtgtgccagcttcgctccggcagcagcgcttcggcgacatcggcatccgacacgatgcaggtctgcgcgccccagcgctgcagccgccgcgagatcagcgacgcctcgatgctgtgcggcgcgaccagcatgatcgactggccggcgagatcgggcgcggtgaagccgtcggcctcgccggtgtcggcggcggcgagcgggatcgacacctcgaaggtcgagcctgaaccgggcgtgcttgccagcgtgatgcggccgcccatgcgcttgacgatgcggtcgctgatcgagaggccgagaccggtgccgccatagctgcgggcgatgcggtcgtcggcctgctcgaactcccggaagatgcgctgctgcgcctccggtgcgatgccgatgccggtatcgcgaaccaggaagctgatctcgttcggccagatcccgggctcgacgatcagcgccacgccgccggtcgcggtgaacttgatggcgttgccggcgagattgagcagcacctggcgcagccgcgcggcgtcgccggtcacctgcatcggcagccgctcgtcgacataggcggcgatctcgatgcctttggtttgcgcgcgcggcgccagcagttcggtgatgtcctcgatcaggccggacagcgcaaaggcgcggtgttcgagatcgatcttgccggcttcgatcttggaatagtcgagcagctcctcgatcagcgccatcagcgcatcgccggaggtcttgaccgccttgacgtaggtcacctgctccggcgttagctgcgtgtccatcaacagcccgctcatgccgatgatgccgttcagcggcgtgcggatctcgtggctcgccatcgccaggaagcgcgacttggcgcggttggcggcgtcggcctgatcacgcgcctcggccagcgcgcgctcgctctcggtgcggtcggtgacgtcgcggccgacgctctgcatctccgccggcgcgccggcatcgttgcgcacgaggccctcgcgccaggcgatccagcgcggtccgagcggtccgtcgatcttctggtcgtagacccgcgtgccgttggattcgagcgcggtgtcgccctgctcgagcaccttgagcgtgtcggtgctgccgatcagttcgctgcgggaagtctgcgccagctcgcaataggagtcgttggcataggtgatgcggccgtcgaggtcgcgcagcacgatcaaatcgtcctgcgcctcgaacagggtggaggcgcgctgctcggcttcctgcagttcccagttgcggtcggccatcgcctcgttgtgcatggcgatggtgcgcaatctcgtgcgcatcagccgcaggcggatgccgagcgtcacgatccagaggcaggccagcgcgaacaggaagctgacgccgatcgcgaatgtattggggtcatagccgctctgttgcgagagggcgccggaaatgaagccgaacgcgctgccgaacgcgatggagaagatcgtgaaggagcggatgatcgtcgcgacccaggaatggcgccgcaggaagcggcgaaagcgcaacttgatccggaagaaacgccccatcaatggtggtcctgagagtacccgttctggtgccgacgatgcgtcggcgatcttgcaaagtgcttgaggttggtggccttttcgggcagccctcggaacagggttagcggagggttaactgcgccatggtctggcggcggaagcgcgtgtgaggtgcgagcgatgccgcgtcgaggcggcgatggccgccgcgggcgctgacgatcagggccgcggcatcgcgcgcggagaacgtcttcgactgcacgtagacgcggtaatcgaacggaccgtcgtgggaaagatagatgaccggaccggttgcggtcggctcgctcgaaatcccgatcagctgcggcaccgcgttgctttcgcaggcgccggcctcggcatcgtcgatgtcgtcgatcacggtgaagtcggccgcgtcggcgctgtcggcgatccggacccggacggtggcaaggtcggggtcgtcggtgaagctgacgtgaagctgcgcctgccagggcaccgatgcgatctgcatcgtggcgccgccggcctcgatgcagggccggggacccggcaggaattcagcgcgggcaaataccgcggccacggcaagcgggaccaccgaggccagaaccttcatacgcaacatgacacaactcgctcgacccaagcgtgccgcggatcgcggtgcttatggtttgcggagcgtaaatgagagtggttaccgtgcagttgacgcgcgcgattccgccgcgaattgaaacaggcttgggtcttggtcaggcggcgcggcgcaaatcgtcggccaatgcacgataggacagcgcttcggcgaggtgcagccggccgatcgtctccgcgccgtcgagatcggcgagcgtgcgcgccacccgcagcacgcggtgatagccgcgcgcggtgaggcgcatggtgtcggccgcctcgcggagcagcttctgaccgtgcgcgtcgggctgcgcgatggtctcgagcagcgcgctcggtgcttccgcattggtgcggatctgcggcatgccggccgcagcatagcgtgcgagctggatgtcgcgcgccgccgcaacacgcgcggcgacctcggccgagccctccgccggcggcggcaggatcaggtccgccgcggtcacggcgggcacctcgatccgcagatcgatgcggtccatcagcgggcccgagatccgcatctggtagtcggcggtgcagcggtcgacaggtgcgcgcttgcaggaatagccgggctcataggcgtggccgcagcggcacgggttcatcgccgcgaccagcatgaagcgcgccggataggtcacgcgatggttggcccggctcaccgagacctcgccgttctccagcggctggcgcagcgaatccagcacccgcggatcgaactccggcaattcgtcgaggaacagcacgccctgatgcgcgagcgagatctcgcccggcttggcgcgcatgccgccgccggtcagcgcggccatgctggcggaatgatgcgggctgcggaacgggcgccgcgccgtcaacgcgccgtcgcggatctcgccggcgacggaggcgatcatcgagacctcgagcaattcggacggcgacagcggcggcaggatcgagggcagccgcgccgccagcatcgacttgccggcgccgggcgagccgatcatcagcagatgatgcccgccggcggccgcgatctcgagcgcgcgcttggcgctctcctggcccttgatgtcgcgcaggtcgagcagcgtttcctcgcgcgcctcgttctggtcttgcaccttcggctgcggccgcgacagcagctgcgtgcccttgaagtggttggcgatctggatcagcgagtgcgccgcgatgatctggatgtccgggcttgcccaggcggcttccgagccgcaggcggccggacagatcagcccctcgtcgcgcgaattggcgccgatcgcggcgggcagcacgcccgccacggctgcgatcgagccgtcgagcccgagttcgccgagcacggtgaagccgctcagcgcatccggcgggatcgccccgatcgccgccatcaggccgagcgcgatcggcaggtcgtaatggctgccctccttgggcaggtcggccggcgcgaggttgaccgtgatgcggcgggcgggcagcgccagccccgaggcgatcagtgccgagcgcacccgctcgcgcgcctccgacaccgccttgtcaggcaggccgacgatcgtaaacgccggcagtcccggcgcgacctggacctgcacgtcgaccgcgcgggcctcaatcccctcgaatgcgacggtggaaacccgctggaccatgctgcccctatcttccgcaattaagggtagtggaaactggtggaaagcgcaagaacattacgggaacaaacttcagcggcaacctcctcatggtaaggatgctgccgacgaagctcttgtgaactgaagtgagggcaatgtgtcccgttacagccaactctacattgatcaagcaggaccggtatcggacagcccgcgcgctcgccgacgcgtcggaaagctgatggagagagtcaccaccgacgacaccacgccagaactgcgagatctcttggagcgcgagttgggaattcgggtaaaggctacctacaatatcgaatggatctcattttgcgagaaatgcgacgttcgcgactttcttgattgcattacactcgccaatactttcttcgtaaagagaggccaatcggccggagcacgcctttggcagctggaggttcggcgcatctttactgaagaacgccttgcgtatgaaatcgatgaaagttgcgttgtccatccagccgtagaccaagaatttcagaggaaccgtcggtccaccttggctggactccagaatgcccgatattcgaacagcctagcggcattcgaacgaatatccgaccaactggcggagcagcctcctaatggaaaagacgcttggcgagcaatttttagcgcggtagaggggctttttcgtctgatgtttccttctgcgccccagttaaatgccggagctgcggaaactcacctaggttcgactattcagcagacgcacgcgaacgacgcaaccgcaatgcgagcagctaacaaacagctggcatcgttcagggactggatagattcctcgcacaattatcgccatgagcagggtagtgaagagccggttcagccgcccattgatctcgcgattttggcgataagtaatggtaccgcgttcttgcgctggcttattcacttggatcaagcaaatagcgctaagccttgaaggtgcctgatgtgagatattgttagcttttccgtgagggtgacaagctgtcaccctcacggagcctcgtacgattacagcgtcatctgcatcggctctggatagtaatgaaaaccctcgccggccttggcgacgtggccgtagccgggccaggcgaagtgataggacatcacaggcgtcttgttggcggccagcgtctccaagagcttgacccgcgaggccgccgcctgcttcgggtcggtgtcataggagaattccatccgcggccgctccagcagcagcaccgcgtgatgcgagaggtcgccgaggaaggcgaacgacttgccgcccgagctcaccatgaagatggtgtggcccacggtgtggccgggcgctgcgatcgcggtcacgccgggcaggaattcctggccgtccttgaagaacacgatgcggtcgcgcaccggcagcaggttcttgcgggcgtgcacgacgaagtccttcagcggactgcccatcttgccttcgtcggtccagaaatcgagatcgctctgcgcgatgtagtattgcgcattcgggaacagcggcttgtcgtcggcgccgacgatgccgccgatatgatcgatatgggcgtgcgacagcacgacggcgtcgatgtcctccggcttgatgccggcttcctgcatgctcttctgctgccggccggtggtcggaccgaacgccttggaggtgcccatgccggtatcgaacaggatcaatttgtcgccggtgttgacgatcggcgaattctgctcgagcacgacattgtcgggcgagagaaaattgtcggagagcatcttcttcacctcttccttcggcacgccggtgaaggtgccggagggatcgccgagcggaagcggaccgtcggagacgacggtcacttcggcatcgccgagcacgaagcggtgccaatagggtgtctgggtgccgagcttcggcgcgcgcgccgaagcggtgccgccgagcagtgtgctggcgccgagaccggcgccgagcgcgagcaaggatcgtcgtgagacattgagcgtcataacgtcttcctccaaatttttatgagtttgttgcgttgtcgcccgcgttggcccgccgcttgacctgacacaggcaagaggatgctgcccgcgcctgcgcaagctggcaagaagaataaggagagcgcaggcgcgacaaagcgctggctcaaattcagccggcatgtgcaacgcacaagggaggaggattatttcgcggcgcgcttcttctcgatggtatcccagatcatcgccgcgacatcgggaccattgagccgctggatggcgcggataccggtcggcgaagtcacgttgatctcggtgaggttgccgtcgatcacgtcgatgccgacgaacagcaggccgcgctcgcgcagcgccggtccgagcgtggcgcagatttcgcgctcgcgatccgacagctcggtcgccttggccgcgccgccgcgcaccatgttggagcgcagatcatccgccgccggcacgcggttgacggcgccggcgaattcgccgtcgaccaggatgatgcgcttgtcgccatgcttcacctcgggcaggaagcgctggatcacccagggctccttgaaggtgaccgagaacatgtcgaacagcgagccgaaattcatgtcctgcggcatcacgcggaacaccgcggcgccgccatggccgtgcaacggtttcatgacgacggcgccgtgctggtcgcggaacgcattgatctcgtcgaggtcgcgcgagatcagggtcggcggcatcagctgcgggaaattcatcacgaacagcttttccggcgcgttgcgcacgctggccggatcgttgaccaccagcgtgttcggatggatgcgctccagaaagtgcgtcgaggtgatataggcgaggtcgaacggcggatcctgccgcagcagcacgacgtcgaaaccgttgagcgcctcgcgcttcgcttcgcccagcgtgaagtgatcgccgacctcgtcgcgcacggtgagcggctgcaccggcgccaccagctcctcgccgcgcagcgacaacttgtcgggcgtgtaataggagatgccgtggccgcgcttctgggcttcgagcagcagcgcaaaggtcgaatcgccgcggatgttgatgcgcgcgatgggatccatctggacggcgatcttcaatgtcataggcgtatcccgagaggtctgagggtaactttaagggctggcgtcgaatgccgctaacagatggcgcggcaggctcctcggcgcaatcagcacggcatcgaacctgaggtcaaattcggcatgttcgggatgcgccatcagccaggcctgggcggcattgacgatgcgctgctgctggcgcggcgtcaccgcataggcggcctcatcgaggctggcgcgggccttgacctcgacgaaggcgacgaggttgcgccggcgcacgacgaggtcgatctcgccatagggggtgcggaagcgccttgccaggatgcgatagcccttggcgatcagcagggccgcggcgcggctctcggccgacaggccggtgcggaaagcggcgacgcgctcgggcgaggcgctgtcagtcttcgcgctgtcagttttggccatcgccgtccccgacggttttggcgagctcgagggcgcgggcatagacctcgcggcgcggccggcccgacagctcgaccgcatgcgcgaccgcatccttgacgctgccgcgggcgagctgcgcgcgcagcaggtcgtcgagcgcattctcatccatcaccccggcatcgtccgccggcggcccgatcacgagcacgaattcgccgcgcgtctccagcgcgtccgcgtttgccgcaagctcggcgaccggcgcgcgcttgacctcctcgtgcagcttggtcagctcgcggcagatcgcagcatcgcgatcacccatgatcgcggcgaggtcgcgcagcgtgtcctgcacgcgattgccggattcgaacatcacaagcgtcgcatcgattcgggcgagctcattgagccgcgcgcggcgcgcatgctccttcgccggcaaaaatccctcgaagaagaaccggtcggtcggcagcgccgcaaccgacagtgccgtcagcaccgatgacggcccgggcaccgcgatcacggcatgcccggcggcgcagacctcgcgcaccagcttgaagccggggtccgatatcagtggcgtaccggcatcggataccagcgcgatcgcggcgccctgcgccagccgctcgaggatcttgggacgggcctgcgcggcattgtgctcatgatagagcgcgagctccgcgctgatcgcgtaacgctcggtcagccggcgcgtaatcctggtgtcctcgcaggcgatgacatcgacccccgccagcgtctccagcgcccgcagggtgatgtcggcgaggtttccgatcggggtcgccaccagatgaagcccgggcctggccttgggtgcggccagctgctggccgccgatcgaaaagcttctggcggcaacgcccgtcgtggcatccgaatggtggagggaactggcttttgcgcgcataatggcaatctagagggacggcggcgcttccgccatccgcaaacggcggcggagaggccgtcgccagggaaggaaatgaaggcagcggcaagggcgccgcggggccataatccttttgttttagttaactattcgccgacaatatgcctgaatccacccgcctcatcagggctgggtggagtcctggccgatcatggtcggccaagagaagagagacgatggaaggcccgcatcaccgcaagtccccacccgatggcacgacccggcgaaccgcgcttggtctgattgcaagcgcgccgttgctcgcggcctgttccggtatccagcagagtttaagccagttttccagcggtaacccggaaggcgttcctgccggtccgcagcagcaaccgcaggcggtcgggaccggacaggtcaagatcgggctgatcctgccgctgtcggcggcaggcaatgccgggctcgccgcgcagtcgatgcgcaacgccgccgaaatggcgctggcggaattccagaatccgaatatccagctcctgatcaaggacgatggcggcagcccgcagggcgccgcgcagggtgcccagcaggcgctgtccgaaggcgccgagatcatcctggggccgctgttcgcaggctcggtgccatcagtcgcgcaactgacgcggccgcgcggcacctcggtgatcgccttctccaccgattcgagcgtcgccggtcgcggtgtctatctgctcagcttcctgccggaatccgacatcaaccgtatcgtcgattactccgcgggcatcggcaaacgctcgttcgccgcgatggtgccggacaacgcctatggcaacgtggtcgaggccgcgttcaagcaggcggccggccgcaagaacggccgcgtcgtcgccttcgagaaatatggcgcggaccgcgccgccgcggcgcggacggtggcgcaatcgctcggccaggccgatgcgctgttgattgccgacgatggcgattctgttgtcgcgaccgccgacgcgctgaccgctgccggcgccaatctgcgcaacatccagctgctcggcaccgggctgtgggacaatccgcgggtgttcgcgagcccggtcttgcagggcggcctctatgcggcacccgatccctccggcttccgcagcttcgccggccgctatcgcaccaaattcggcggcgagccggtgcgcaccgcgacgctcgcctatgacgccgtggcgctgatggcggcgctggcacgcacccagggtgcgcagcgcttcgcgccggagacgctgaccaatccgtccggctttgccggcatcgacggcctgttccgtttccgctccgacggcaccaacgagcgcggcctcgcggtcatgaaggtggcatccggcggcagcacgccggttgcgggttcgccgaagagttttggggcttaattttcgtcagccggtcgaaccgtcttgtcgagcgtcggtgcccgccggctgctttgcatggggttgttttcgatattttggcagcggatgcctaaagcgggatgagtttcggtggaatcggcttagcccggtcttggttcacctctccccgccggggagaggtcggattgcgaagcaatccgggtgagggctcttgctctctcgatagaccgtaaaccctcacccgatttgctgcgcaaatcgacctctcccaagggagaggtgaatcgtgttcgtggccaaaccgattcaacccaacttcatgccgatctaagccgcgagatccgcgacgacggcgtcgagcaccgggaagcccgatttggtcacgcgcagccgtccgtcggcatcgacggcgatcgcgccttcctcgcgcagcatcgcgatccggtgcggatcgagctttcggccggagagctgcgcataacgcttgggatcgatgccctcggcgagccgcagtcccatcagcaggaattcgtcggcgcgctcctcgctgttgaggctgtcatcggtgacgacgccatgaccgcgctcctcgacattgagcagccaggcctcgggacgccgctcggtcgcggtcgcatgcctgacgccatcgatgtcgagccttccatgtgcaccggggccgatgccggcatattcctcgccgcgccaatagaccagattgtgcttgcactcggcgccggcgcgcgcgtggttggagatctcgtaggccggcaatccctcgcgggcacagacctcctgcgtcacgtcgtagagcgcgcgcgaggtcgcttcatccggcgtctgcaatttgccggcggcgtgcagcccgaagaacggcgtgccttcctcgatcgtgagctgatagagcgacagatgctcggccgcttccgagatcgcctgcttcaattcatcggcccacatccgcggcgtctggtcggggcgggcgtagatcagatcgaacgagtagcggtcgaacgccgaacgcgcgatcgcaaccgcatcgagcgcctcgcgcgcggtgtgcaggcggcccagtgccttcagcgacgcgtcgtccagcgcctgcacgccgagcgagacgcggttgacaccggcggcacgatagccgcgaaagcgcgtcgcctcgacgctggtcggattggcctcgagcgtgacctcgacgtcgcgcgcgacatgccagtgcttgccgatcgcatcgagcacggcgccgaccgtctgcggctgcatcagcgacggcgtgccgccgccgaggaagatcgaagtgacctcgcgccccggcacccgcgccgccgtggtctcgatctcgcgggcgaaggcgcgcacgaagcgcgcctcgtcgaccggcgcatgccgcacatggctgttgaagtcgcaatacgggcatttcgacaggcagaacggccagtgcacgtagacgccgaaagcttctcgttcagcgtggctcaaggcagatctccgcgagcttcacgaaggcgcgggcgcgatgcgacaggccgagcccgagcggcggcaagccgtgtttctcgatgctggtcatctcgccgaaggtccgcgtgtaaccgtcgggcaggaacgccggatcatagccgaatccggcagtgccgcgcggcggccagaccagggttccatcgacccgggcctcgacctcttcgaggtgatcgtcgggccaggccacgcacagcgcggagacgaaatgggccttgcgctgctccggtgcggtggcgccgcgctcctgcagcagccgctcgatccgcgtcatcgccgccatgaagtccttgccctcgccggcccagcgcgccgagtagattcccggcgcaccgtcgagcgcgtcgaccacgaggccggaatcgtcggcgaaggccggcaatccggtcgccttcgctgcggcgatcgccttgatcgccgcattggcgcgaaagctgtcgccggtctcctcgggctcagccagatcgagctcgccggccgacaccgcctcgacgccatgcggcgccagcagttcccgcatctcggcaagcttgccgggattgtgggtggcgatcacgagccttccggtgattcggcgatgcatgaccaatctgactacgccaccgcgatcttttgcaagtcgaccagacgcgcgacacctttgcgtgccaaggccatcagcgccaggaattcgtcttgcgagaacggcgtcttctcggcggtgccctgcacctcgatgatgcggccgtcgccggtcatgacgaaattggcgtcggtatcggcctcggagtcctcggcatagtcgaggtcgagcaccggggtgccctggtagatgccgcaggagatcgccgccacgttgtcgcgcaacacgttggtcttcagcatgttgcgggtcttcatccagttgatgcagtcggccagcgccacccaggcgccggtgatcgaggcggtgcgggtgccgccatcggcctggatcacgtcgcaatcgaccgtgatctggcgttcgccgagcgcttcgagatcgacggcggcgcgcagcgagcggccgatcagccgctggatctcgaccgtgcggccgccctgcttgccggcggaggcctcgcggcgggtgcgttccagggtggcgcgcggcagcatgccgtattcggcggtgacccagccgcggccctggcccttcagccatggcggcagccgctcttccagcgtcgcggtcaccagcacatgggtatcgccgaacttcaccatgcaggaaccctcggcatatttgacgacgccgcgttccagcgacacggggcgcagttcatcgggcgcacggcggcttggccgcatgaaatcctccaaaaatccgacagatagagctgggcgtgcttgtaggaggggcagggggcagcggcaagggtcttggcgagggttttcggccccggattggtccggtaccagagggccgaatgcatgcttgtcaccggcctcccggatcgacaaattaggtagcaattgtgagggactggagtgtgactcaccacgatccgatcggcctgatcgcgccgcatgccgggcttgcccagctcaacgagcgttcgcgggatatttttcgtcaaatcgtcgaaagctatctggcgaccggcgagccggtcggctcgcgcaacatttcgcgcctgatcgcattaccgttgtcgccggcctcggtccgcaacgtgatgtcggatctcgagcagctcggcctgatctatgcgccgcatacctcggccgggcggctgccgaccgaactcgggctgcgtttcttcgtcgacgccctgatgcaggtcggcgacctcaccgaggccgagcgtcagtcgatccagacccagctggccgcggtcggccgcgcgcaatccgtcgaggcggcgctcggcgaagccttgacgcggctgtcggggctgacccgtgccgcggctgtcgtgctgacgcagaaatcgaatgcgcggctgaagcacatcgaattcgtgcggctggagccggagaaggcgctggtcgtgctggtcggcgaggacggccaggtcgagaatcgcgtgctggcgctgccgccgggcgttccgtcctcggcccttacggaggcgaccaatttcctcaatgcccggatccgcggccggacgctggccgaagcgcggctcgagctcgagaccgcattgacgcagaaccgagccgagctcgatcagctcacccagaaagtggtcgcggccggcatcgccagctggtccggcggcgagagcgaggaccgccagctgatcgtgcgcggtcacgccaatctgctcgaggatctgcatgcgctcgacgacctcgagcggatcaagtcgctgttcgacgatctcgagaccaagcgcggcgtgatcgacctgctcggccgcgccgagcgcggcgaaggcgtgcggatcttcatcggctcggagaacaagctgttctcgctgtcgggttcctcgaccatcatcgcgccctatggcgacgcccagggccggatcgtcggcgtgctcggcgtgatcggcccgacgcggctgaattatgcgcgggtgattccgaccgtcgattatgccgcgcgcatcgtcagcaagatgctgggcggctgactgggctggatttcgctttcatttgaagggttttcttgacccgaaccggagatccctgttgccgaagccggatgttgcgcttgattttcgccgcctaaagcacgatatcccggcaagcaatccccaagatttgaaccgacgcgagttttcgagaaggcacgccatgaccgatccgaaccgggccaatgacaacaccgagaattcggcgccgacgggtgagcccgtggtctcgaagccctacatcatgcctgacgatcccgaggtgggatcggccgaggcgctggccaaggaactcgccgaggcgaaggaccgcacgctgcgcacgctggccgagatggagaatctccgtcagcgcacccgccgcgaggtcgccgatgccaagacctacggcatcaccggcttcgcccgcgacgtgctcgatatcgccgacaatctgcagcgcgcgatcgatgccgtgccggccgagaccaaggaatccgccgatcccggcctgaaggcgctgatcgaaggcgtcgagctgaccgagcgttcgctgctcaacgcgctggagaagaacggcgtcaagaagttcgatccgatcggcgagaagttcgatccgaacttccagcaggcgatgttcgaagtgcctgatgcgtcggtgccgtcgggcaccgtggtgcaggtggtgcaggccggctacatgatcggcgatcgcatcctgcgtccggcgctggtcggcgtctccaagggcggcgccaaggctgcaccaagcgccgacatcacggtctgatccgtccgaccttcgaacgatgagcgcgctgtcgtggattcacggcagcggcttctcatgcgccttcggccagtaggttccgaagctccagaggtttccttccggatcgcggcaggcgaaatcacggctgccatagtcggtgtcgcgcagttccatctcgatcttcgcccccgccgccttggccctcgcatgcagggcgtcgggatcgtcgaccgcgacatagatcgaatcggtgcgccggccatccatgcccccgatcagcttgccataatcatcgtcgcggctctggccgagcatcaggatcgaggaaccgtaggccagttcggcgtgatggatcaccccgtcgtggcgatagacgacgtattcggtgaacccgaatgccgccttgaaccagccgaccatcgcctcggcatccctgcaacgtatcgtcgggaagatgcggggcggttcgatgttgctcatgattgcgcgtttcctttgttggtcgccggatggcgccaatatgcgtaaggctgagtgtcaccggcttgaaggtttgttaccggtcggccagcagatcgccggaatgcgccagccggctgtcggtcatcgccaaccggcgtgcccacgccgtcggcggttccccggcgaattcgacaaattcgcggacgagatgggcctggtcggaatagccgctttcggctgcgatcgccgcccaggcgcgcggcccgccgcgctgtgcgatccggcaggcctggtgaaagcgcatcatccgcgcgagcgatttgggggcgaggccgagctccgatcgaaaccggtcgacgaggtgcttgcggctccagccgatctcagcggcgagcgtcgtgatcctgaccgtgcccgcggatcgcgccagtctgcgataggcggccgcgatctccggcgatggcgcatggttcgcgcgacgaagcacgaagtcctcgatcaggtcgaagcggcgctgccagcaggtcgtattgccgagccgctcgcggagccgccgcccctcgtggccgagcacgtcgccgagatcgatcatccgcccggcgagctcggtgacggtgccgccgaagaagcgataggcgccgagcggcgtgaaatccacctgcacgcattcggccccgccgtcggactcgatatagacgggcccggcgtgcaggcccgcggcgaagctgagctgccggtcggacgcaccgggctcgcgcgccagcgcgatcaggaacggcgtgccgaaactgacgatcagcggggcgatcagcggcgcggtctgccgccgcgaatagcggccggcgacggcctcgcgatagccggtgatcccgacaatcaagcccgccatgcgcggcgacggcgagcgtcgcgcgaagtcgaatgcgaccggcgctgagacagcggccatgcgggcctcgcagcgaagatcttaggcgatatccgccgactggatgcgcttgacgccggccttggccatgtcatcccacgccttggccagcgatccctgggtgtctatgccgcggcacgcgtcttccacgacataggtttcgaagccggccttgcgcgcgtcgagcgcggtccacgccacgcagaaatcggtggcgagcccggccacgaagacccgctcgaccttgcgcgctttcagataggcggcaagcccggtggtggtgttgccgtcggcttcggtgaaggcggagtagctgtcgacgtccttgtgaaagcctttgcggatgatcagctcggcctgcgggatcgcgagatccttcgacaggcctgcgccgtcggtgccctgcacgcagtggtcgggccacagcacctgcttgccataggcgaggtcgatggtctcgaacggcttcttgcccgcatggaccgaggcaaaggacacgtggccgggcgtgtgccagtcctgcgtcatcaccacattcgcgaagctcttggcgatcttgttgatgacaggcaccacctggtcgccttccttcaccgcgagactgccgccgggcaggaagcagttctggacgtcgatcacgagcagcgcggcaccatcgtccggcttgatcgcggccgcccaaagatgtttgggaaccagggtccccagcaccaacgtgccgaggcctgcaaccacctgtcgtcgatccaacatcgcgcccctcctcgctttgcgtgatactgcgcgaggaggctagttccgttcggcgaacgacgaaagtgggatttttccgaccgggccgcgaaaggccggtcagccgcgcggctggatgccgtcgcgcaccgcgcggaagcgcgggaaggccttctcccaatcggtgcgcggtgagctgccgatgacgcgcaccgacgtttgcgcgccgaaccgcagccactgcacgatggtcaccggggtgttgtccttgccgctgatggcgtcgatccgggtctcgaagccgggctggccgtcgatccggatcggctcggacatggtgatccgcccgtcgcgcacgccggggatcgtggtcgcgatctgctgggcgaagcggccgcggtcgtcgggcgtggcgggggccgacccgatgacgccgagcagcatgaagggcttggtctcgaggctcttgtcgtcgccgtcggccatcagcaacgctgcgcccggcgccagcatgcggatgttcttgaaagcgctgagctcggtgaccttgaacggcatcataccgagctgctcgtcgaccggcacctcgttgcggatctgggccgaggcgaacatctgccgcacggcgtcgtcggtgtagatcctgctggcgttctccgggacctgcaccgcgacatagccggagaaggtcggtcccggcaggatcatggaataacgccgcacagtgctggcgccatcgcgcgcgctctccacggtgtaataggcgaggccggccggcgtctcgaggctctcgggcttgatgtttccggtgccggcggggttggccttgaaggcggtcacgacctcgttgtaggcgtccgccggcaggtccgcgatcaggaccttgacgccctgatcctcggtctcgaagccgatgaacgacttggcccggacgaggcccaccagcggcttcatcccgacatgcgcgcccggcggaaacaccacgtcggcggcgaagccacgacaggtggcagcaatcagcaaggcaaccgcaacgagaactcgaaaaggcgtcatgggggatctaccggttttgcttggtggccgcgcaacggggccggtgcagggctggatggcctctttcagtcggaccgcttttagcggttttgatgaccctgcaacaggtcgccaaatctccgcttcgagcccacaggctcgattccgtgggcttttcgccccgattggctggcactttccagtttcccgacatttccaagaatggtggccagcggccaaacagcgcgccctcgacccgtgcgccgctctcgcatacgatgtttgtgagtgttcactcaacagcgcagacgtcgcgtctccgacgttcgggtcgacggccggcggcatcattgccgatttgttaactcggcgggggcgctggttgccacttgaaccggcgccgcggtcggactgacacaatctttcaaacgtcagtcttttcaggcctcaacgttgcgtccagtccttgcgggcagaaccctctctcctatatcaggctcaccgtcgcaatatcgcgagtatgtgaacgtctgggggttcggtacggagcgccgtcagggcccaaccaacctgccgtagcaaagaggatatcaaaatcatgggtaaggtcattgggatcgacctcggcaccacgaattcgtgcgtcgccgtaatggatggcaagaacgccaaggtgatcgagaatgccgagggcatgcgaacgacgccgtcgatcgttgccttcaccgacgatggcgagcgcctcgtcggacagccggcgaagcgccaggcggtgactaatcccgagcgtacgttctttgcggtgaagcgcctgatcggccgccgctatgacgacccgatggtcgagaaggacaagaagctcgttccctacaagatcgtcaaggcatcgaacggcgacgcctgggtcgaagccgacggcaagacctattcgccctcgcaggtctcggccttcatcctgcagaagatgaaggagaccgctgaggcgcatctcggccagaaggtcgatcaggccgtcatcaccgttcccgcttatttcaacgacgcgcaacgtcaggccaccaaggatgccggcaagatcgccggcctcgaagtgctgcgcatcatcaacgagccgacggctgccgcgctcgcctacggtctcgacaagtcgaagtccggcacgatcgccgtgtacgacctcggcggcggcaccttcgacgtctcgatcctcgagatcggcgacggcgtgttcgaggtgaagtcgaccaacggcgacaccttcctcggcggtgaggatttcgacatgcgcctggtcggctatctcgccgacgagttccagaaggagcagggcatcaacctgcgcaacgacaagctcgctttgcagcgcctgaaggaagctgcggagaaggccaagatcgagctgtcgtcgaccacgcagaccgaaatcaacctgccgttcatcacggctgaccagaccggtccgaagcatctgacgatgaagctgactcgtgccaagttcgaggcgctggtggccgatctcgtcgagaagaccatcgagccgtgccgcaaggcgctgaaggatgccggcctgaccgccggcgagatcggcgaagtggtgctggtcggcggcatgacccgcatgccgaagatccaggaagtggtgaagcagttcttcggcaaggagccgcacaagggcgtcaatcccgacgaggtcgtcgcgatcggcgctgcgatccaggccggcgtgctgcagggcgacgtcaaggacgtgctgctgctcgacgtgaccccgctgtcgctgggcatcgagacgctgggcggcgtgttcacccgcatcatcgaccgcaacaccacgattccgaccaagaagagccaggtgttctcgaccgccgaagacaatcagggcgccgtgaccatccgcgtcttccagggcgagcgtgagatggcggccgacaacaagatgctcggacagttcgacctgatgggcattccgccggctccgcgcggcatgccgcagatcgaggtgaccttcgacatcgacgccaacggcatcgtcaacgtctcggccaaggacaaggcgaccggcaaggaacagcagatccggatccaggcatccggcggtctgtccgaggccgacatcgacaagatggtcaaggacgccgaggccaacgcggccgaggacaagaagcgccgcgaggcagtcgacgccaagaaccatgccgacggcctggtgcattcgaccgagaaggctctcgccgaacacggttcgaagattccggagaccgatcgccgggcgatcgaagatgccgtcagcgacctcaaggaggccctgaagggcgacgacgccgaggcgatcaaggccaagaccaacacgctggcgcaggcttcgatgaagctcggcgaggccatgtacaagcagcaggccgaggccgatgcggccaaggacgctgccaaggatgacgttgtcgacgcggagttcaccgaggtcgacgacgacaagaacaacaagaagtctgcctgagcgggcttgcgatcatgaccctcacgccaaagagcacgcgccgcgtctcggaggagtgggggtcatttttctttaaggcgatcgctgcatcttccagacaggcgcaatccttgacgcgatcctattggcgatcgcgatgaacttcggacggaattgaaggatgtccaccaagcgctgctattacgagaccctcgaggtcgaacggaacgcggacgagaccaagctcaaatcggctttccgcaagctcgcgatgaaatggcacccggacaagaatcccggcgacgccaccagcgaagtccgcttcaaggaaatcaacgaagcctatgaggtcttgaaggacggcgacaagcgcgccgcctatgaccgtttcggccatgccgccttcgagcagggcatgggcggcggcggccccggtttcggcgctggcttcgcctcctccttctccgacatcttcgaggatctgttcggcatggccgggcagcgccgcagcggcggccgcgagcgcggcgccgacctgcgctacaacatggagatcacgctcgaggaggccttccagggcaagaccgcgcagatcgagatcccggtctcggtgacctgcgagtcctgctccggcaccggcgccaaggccggcaccaagccgaagacctgctcgcattgcggtggcgccggccggattcggcaggcccagggcttcttcacgctggagcggacctgccccggctgccagggccgcggtcagatgatcgaggatgcctgcacctcctgcgccggttccggccgggtgacgcgcgagcgcacgctctcggtcaacattcctccgggggtcgaggacggcacccgtatccggctcgccggcgaaggcgaggcgggggtccgcggcgggccgcccggcgacctctacatcttcctgtcgctgaccgcgcaccagttcttccagcgcgacggcgccgacctgcattgccgcgtgccgatctcgatggtcaccgcagccctcggcggcgagttcgaggtgccgaccatcgacaagggccagaccaaggtgaaagtgcccgccggcacccagtccagccggcgattccgcatcgcatcgaagggcatgccggtactgcgctcgcgccagaccggcgacatgtatgtccaggtcgtggtcgaaaccccgcagaatctgaccaagaagcagcaagaattgctgatggagttcgaaaaactctcgtccggcgcaacccagccggaggcagcgggtttcttctctaaggtcaaggacttcttcggaagtcgctccgtctagccggagtcgttacgcttgaccgtaacgacttcgatctatacgtgtttatgactgttttctgacaaccgctcgattgtgcgcggtcccgcctggtagcgacatgcctctgcaatcgtccgtgcgtgcgtcgaagaagcccctccgtctcgacgacgaggttcgttttctccgttcatggatcgagaagccgctgcacatgggcgcggtgatgccgtccggacggctgctcgcgcgcaccatggcgcaatatgtcgatgctgacgccgaagggccggtcgtcgagcttgggcccggcaccggagcgatcaccaacgcgctgatcgagcacggcgtcgatcagaagcggctcgtcctggttgagtataatcccggtttctgcgcgttgctgcgcgaacgctatccgcaggccaaggtcgtgcagggcgacgcctacaggctccgcgacacgctgtgggacgtcatgaagtctccggcgtcggccgtggtctccggcctgccgctggtcaccaagccgatgctcacccgcctgaagctgatccgcgacgccttcctggctctcgcgcccggcgcgcccttcgtccagttcacctattcggtggcgcccccgattccgaagtcgctgcccggcgtgtccacagaggcctcggagcggatctggatgaaccttccgccggcgcgggtctgggtgtatcgcaagggttgatcgccccgcgccggggtgcacgccctggacctgcgacttcaaaatgtccgcgctgaaaatcctcgtgatcccgggatcgcttcgatccggctcgctcaacacgaagctcgccgccgtgctggcgcacgagctcgcgcagtcgggcgccgacgtcagccgcatctcgctcggcgactttccgttgccgatctatgacggcgacctgcaggccaaatcgggcgtgccgcagcacgccgtcaatctgaagcggatgatcggcgcccatcatggcgtgctggtcgtgacgccggaatacaattcctcggtgccggcgctggtgaagaacacgatcgactgggtgagccgcgtgcaggacccgcaagaggcccgcggccaggtgttccgcgagcgcgtgttcgcgatcgctgcggcatccggcaaccggctcggcggcatccgcgcgctggcggcgctgcgcctgatcctgtcggcgtgccacgccaccgtgatcccgaaccagctcgcgctgtcattcgccgagcaggcctatgacgatatggatcgtctgaagcaccaggccgacatcgacacgatgcgcgcgctggtgcggcagctgatcgaccattctcaacgcatgatgtgaggtgacatgcagccagccaagatcgcttcaaagatcgctccgaaagatcggttgattgtggcgctcgatctgccgtccgtcgccagcgccgaggcgatgatcgaccggctcggcgacagcgtcaccttctacaagatcggctaccaactcggttatgccggtggcctcgcgctggcgaagcagctcgccggcagcggcaagaaggtgtttctcgatctcaagctgcacgacatcggcaacaccgttgcgcgcggggtcgagagcgtcgcggcgctcggcgcgaccttcctcaccgtgcatgcctatccgcagaccatgaaggcggcggtcgatgcgcgcgccggctctggcctcaagatcctcgcggtgacggtgctgacctcctacgacgacagcgacctgcacgccgcaggctaccgcctcaacgtctccgatctggtcgaggcgcgcgccaggcaggcacaggcgctcggtgtcgacggcctcgtcagctcgcccgaggaggccgccgccctgcgcaagatcgtcggcgatcagatgaacctggtgacgccgggcatccgccccgcgggctcggcgaccggcgaccagaagcgcatcatgacgccggcccgtgccattgccgccggcgccgactatctggtggttggccgcccggtgatggaagccgccgatccgaaggccgcagccgaggccattcacgccgaggtcgcccaggcactgacctgaaccaacaacacgggagaacagagatggcgaagggatactggattggacgcgtcgacgttcacaatgacgagggctacaagccctacatggccgccaacccggccatcttccagaaattcggcggcaagttcatcgtccgtggcggcaaattcaccagcgtggaaggccagagccgctcgcgcaacgtcgtgatcgaattcccggactatcagactgccctggcctgctacaactcgccggaataccaggcgaacatcaaggtgcggcagccccattcgatcgccgacctcatcgtcatcgagggacacgacaacccgtagcctggcagccggttcggttgccggaacagccatggctcgctatacggcatgcagaggtgagccatggctgacatgcgtttgatcgttgcgggagccggcggccggatgggccgcacgctggtgcgggtgattgacgaaaccccgggggcggtgctggtcggcgcgctggaagcgccgggctcggaattgctcggcaaggatgccggcgtgcttgccggtctccccgccaacggcgtcaagctgtcggccgatctgtggtcgatgtcggccaacgccgacggcatcctcgatttcaccgtgccggccgcgaccatcgccaatgtcgcgatcgcggccgaacgcggtctggttcacgtcatcggcaccaccggcctgtcgccgtccgatgatgcggtgatccgcagcgtcaccgaccgcgccatcgtggtgaagtcgggcaacatgagcctcggcgtcaatctgctcgcggcgctggtcaagcgcgtcgcgcagtcgctcgaccagagcttcgacatcgagattctcgagctgcaccacaagcagaagatcgacgcgccatcgggcaccgccttgatgctcggcgaagccgccgccgccggccgcaagatcgcgctggagcagcattcggcgcgtggccgcgatggcctgaccggcgcgcggcgcgccggtgacatcggctttgcatcgttgcgcggcggcaccgcggccggcgatcacagcgtgatctttgccggtccttccgagcgcatcacgctgtcgcatcatgccgaggatcgcgcgctgttcgcgcagggcgcgctgaaggcggcgctgtgggcgcatggcaagaagcccggcatgtattcgatgaccgacgttctcgggttgagcgactgagaccgctcgacgagatcaaatccaaatcagcgaaacggaatctgaaatgagtgatcgtcttcttgtgctggttcgtcacggtcagagcgaatggaatctgaagaacctgttcaccgggtggaaggaccctgacctcaccgagcagggcatccgtgaggccagggacgcgggccgcaagctgaaggcgcaggacctgtcgttcgacgttgccttcacctccgacctgacccgcgcgcagcatacgctgaagctgatgctggaagagatcggccagaccggactgccgacgacgaagaatctcgcgctcaacgaacgcgattacggcgatctctcgggcctcaacaaggatgacgcccgcaagaagtggggcgaggaccaggtgctgatctggcgccgctcctacgatgtgccgccgcccggcggcgaaagcctgaaggacacgctggcgcgcacgctgccttattacgtgcaggagatcttgcccggcgtgctgcgcggccagcgcacgctggtcgccgctcatggaaattcgctgcgcgcgctgatcatggtgctggagaagttgtcgccggagcagatcctgaagcgcgagctcgcgaccggcgcgccggtggtctatcggctcaatgcggattccaccgtggcctcgaaggtcgatctggcgggctgagctaagcgatggacccgtcatccccgcgcaaaggctctgcctttgtcgctggaggagcgcgcccttgcgcgcgtctcgcaggatgcacggccaccagccgggccgtcgacccttcgagacggccgctgtgccgcctcctcaggggtgacggtgaaggagtgtgcgcctcctgatctaggcaggggcgaccatgctgctagatcaatgccggaaatgccgcacgccggtgaacaccatggcgatgccgtgctcgtcggcggccttgatcacctcgtcgtcgcgcatcgagccgccgggctggatcaccgcggtggcgccggcctcgatgcaggccagcatgccgtcggcgaacgggaagaacgcatctgatgcgaccaccgaacccttggtcagcggctcggcgagcttcagctcggccgcggcatccagcgccttgcgcgccgcgatgcgcgcggaatcgacccggctcatctggccggcgccgatgccgacggtggcgagatctttggcgtagatgatggtgttcgacttgacgtgttttgcaacgcggaaggcgaatttgagatcgcgcagctcggcgtcggtcggcgcgcgcttggtcgcgaccttcagattcatgtcctcaaccaccgcattgtcgcggctctgcaccaagaggccgccggcgacggtcttggcggtgagaccgagcgcgcgcgggttcggcagaccgccggcaagcatgaggcgcagattgcgccggccggcgatgatcgagatcgcctcctcggtcgcgtcgggcgcgatgatcacctcggtgaagatgccgatgatggcgcgcgccgcgtccgcatcgagcgtgcggttgaccgcgatgatgccgccataggccgaggtggagtcgcaggccagcgcacgagcataagcagtcgcgagatcgggaccctcggcgacgccgcagggattggcgtgcttgacgatgacgcaggccgctgtgcgctgcgggtcgaactcgccgacgcattcgtaggccgcgtcggtgtcgttgatgttgttgtaggacaattccttgccctgcagctgccgcgcggtggcaacgcccggccgcttctccggcgtggcatagaacgccgcggtctggtgcgggttctcgccgtagcgcagcgactggatcagcctgccgccgaaggcgcggaagtccggcgccttggtatcgagctgcacggcaaaccagttcgagatcgcggcgtcataggccgcgctgcgcgcataggccttggcggcgagccgccggcgcaactgaagcgaggtcgcgcccttgtgcacggcgagctcgtcgagcaccgcagaatagtcgctcgcctcgaccaccacggcgacgtcgtcatggttcttcgccgcggcgcggatcatcgcagggccgccgatgtcgatgttctcgatgcactcctcgaagccggcgcctttgtcgacggtggcctcgaacggatagaggttgacgaccaggagatcgatcggcgcgatgccgtgcgaggccatcgccgcggcgtgctccttgttgtcgcggatcgcgagcaggccgccatgcaccttcggatgcagcgtcttgacccggccgtccatcatctcggggaaaccggtgagctcggagacgtccttgacctgcagcccggccgccgcgatcgccttggcggtgccgccggtcgagaccaactcgacgccctggtcggccagcgccttggcgaaatcgatcagtccggtcttgtcggaaacggacaacagagcgcgggtcacgcggcgaagctgctcggtcatatcggaaaatccttggcggttaaggcagccgggtagcatggttttatgcggcacgaaaccggttccggacgccgattcccgggaaattggcccttcaccctgagagaatgtgaagggacggctcacaaacgttcagcgtcgtcctggcgtaagccaggacccattaccccagccgctagttgttgtccgacgctggggccaccatcccgcacacaatcaaatttggtggttatgggtcctggccttcgccaggacgacggggtggagaggccgcgcgctgcggatcgcgcgttttcgctgccgctacagcggcagttccggctcgcggcgggcgttgcggcgggcgttggtggcggtggccgaggtcgaggagcggacgaagctccagcggatggtggcggcgtgcctggcgtcctgccggatcacgatctgcgaggtgcggcgcgggccgtcattgccggccaggaacacgctgtcctcgaggtcgaccttgtcgtccatcgcctcgaaggtccagacgtcgcggtttggcagcaccagcatcacgccgcgcgcatccgacaaccggctcgccttcaccgaagggtgcagatggaagcgcagcgcgaaatcggcctcgctgcccttcatgcggccgcccggcgccggcgacagcgagtcctcgccttcgagtcgcgtgccgtcctgggagaccatcagcacgcggcgatggatcacgccgaagcgggagagatagccgtcatgcgaggcggtgagcacgtcgccgccgggaacggcttcgcggtagctctcgacattgctgggcccgctggtgatcggcgcgccgcgcagcagccgcttcatcgccgacagctcgacgaactggcacgacgaggtgtcgtgataggtcagcgtcgaatgcgctgcggtggagcgcgcgaacggccgccaattgtcgcgcccggtcgacggcatgccgcaattgacgacgatgcggctcggtcccgaggagagctcgaacgacaggcagccggcatgtgcatcctggctgacgcttgccggcggcggcggaccggtgtcgatgatcagcgtggtgttgccggcatcgagacgctggaagccggtgtgcggcatgctcgccatcggcacgccgcgggtgtcgtcataggcgagcagcgtcgcgaccagatcggacggcgcggtcgacatgccgttgaacagcgcgaagctgccgtcgccgtgccggaagaagcgcagcatcggcatcatgcggtcgatcgcgttgagcaacgccggcggcggcgcgatgttacgtgccgcaaaggtctgccgcagcggcaggaggtcgctgagcagctcgaccagcgcgccgggattgcgcgagatgtggccgccatcgggcaggatctggcgctgcaattcgtccgacagcctgcgggtcgccgacttgatattgcgtgcctggttggcgaggcagagcgaggcgtagcacagcgcgatcagcacctgcagccgcggcacgccgtcattgtcgagcgtggagtggcgcaggtagcggatctcgcgcgccagtccgcggagatacttgcggtagaattttccatcggtgtcgccgagcaccaggggagcctgcgacagcagcgagatcacgcgccgcgcgcgcacatcggcgcgccgttccagcggccgcttgcgggcctggttggagatccagtcgtcgacaagcgagcgggcattggcgcgggtcagcgcggtgtcggcggcgcgcagatggcgcagccagccgaagccgagcagggcggcttcccaatcctccgacggcggttccagatcgaagatcgagcggccgtggcaggtgacgatcttgccggcgaacacgaatcgcccggcatagatctcggcagcgcgggtggcgtcggcggtccgcaggtcgtgcggcgcgatgatcagccggtcggtgcggcccggccacagccgcgacagcgcgaccgtgctgccgctggcgcgcgcgagcatgctgcgggcgaagcggccagcaatcagcgtcgagatgcgtctgctttgagcgaccgacacgcctaaccttgcggggaggaaattttcaacgaatccttatttaatccggaaacgcggccaagacaccttcttgatcaagaagacaccctcttgataccgcgcgaatcacttcgagcttagaaggctgaggttaaaatcaggacttaaccagccgggctgcgtaaaagccatccagcccgctcagccgcgggtcggcgttgggcaggtggctcggcagggtgcgcaggtcgccgtcggcggtaatgatgtcgtcgaggccggcgacctcgctcttctcgaccggcgcacggcgcaggcctgattcgcttgccagcagcgcggcgatcgcgtgctcgccttcctccggctccagcgagcaggtgcagtagaccagcgtgccgccgggcttcagcagatgggtggcctttagcagcagccgcttctgcagggccgagagcgcggcgatgtcgccttcctggcgcagccaggcgacgtcgggatgccggcggatggttcccgtcgaggtgcagggcgcatcgaccaggataccgtcaaaactcgcggcctcggcgggccattcggccgcgtcggcgacaacagtctcggcctgcaacgccagccgcgtgagattttcgcgcaaccgcgcgacccgcgccggcgagcggtcgaccgcggtgacctgcgcgcctgccagtgcgagctgagccgtcttgccgccgggcgcggcgcagaggtccgcgaccttcttgtccttgatgtcgccgaacagccgcaccggcagcgcggcggcggcgtcctgcacccaccattggccttcggcaaagcccggcagcatggtgacggaaccctgcagcagcgtgcgcacggttcccgtcggcaagacctcgccgtgcaggcggctcgcccattgcgcggcgtcggacttcaccgtgagatcgagtgacggctcgtggccgagcgccagcgccatctcgcgcgcggtggcctcgccgtaatgcgcgttccagcgcgccagcatccatggcggcaggtccagcgtctgcgtgctgatctcgtcgatcagcccctgggcctcgcgcgcgcagcggcgcagcacggcgttgacgagcccggcatacttcgcggcacggcggtccgactgcaccagccgcaccgagagatcgactgcggcatggtcaggcacgtccatccagaggatctgcgcggcgccgatcaacagcgcgctctgcgcgcgcggcgcatcggtcgggatgccgcgatcgagcaggcgcgacaacagatggccgagcgtgccgagcttgcgcaggatggtcgagaccagccggcgcatcagcgcgcggtcgcgatcggccagcgatttcaggccgggatgcgcgccggcgccgtcgagctgatcatcgagtgtgcggtgcttgtgcagcacgccgtcgaggatgtcggccgcgatgcggcgcgccgcgagaccggggacttcggcaggaactgcaaatcttgaaggaggcatgaagcggagatatctcgaaggtgctgagttacattcggctcatgcccatcaactcgaaaacacctctggcatgcgaatatgccaaatgtaagaatcgcctcgcggatttcttgatcgtgatgccgtcaccgagccagcacggaagtacgaattcgcaggcggaaagttttgccaagaaggcttgccatgtctgagaaatcgccatcgtcaacgccgccggaacccgcgccgcgcaagccgctgacgccggccgcgcagcgcgcgctcgccgaggccgcggcgcggcgcaaggctgccgaggagctggccgcgaacgatgccgccgcacgcccgaaggaattccagggtccgaagggtccggaaccgacccgttatggcgattgggaaaccaagggcatcgcctcggacttctgaagcgggattccggacaacaatcgacgcaagcaacatgccgccgaacatgagctgatcatggaagaaagccggggggcattgtaagcatatcatggtatctaattaccaagtaacccgcgattaaccgtactcatcatacgttgcggggcaatcgccctgtgtgttgagttaactaggttggaatgcggcatgtcgattcagcagacagagggagcaacagcaccctatcgcgacctgtctcaatccagcgacaaggtctcggagggcgtcgacctgaaggatgtcatcggcatcctcttgcggcgcaagcactggatctttgcgatatgcggggcgttttgcgtggtggcggccacgtatctcatgatcgcgcgaccggcctacaccgcggtagcccaagtttacgtcgatccccgcgatcgcccaacgccgcaagaaggatcggcggcccagaactccgtgcctggcgacggcctgctcctcgtcgaaagccaactgaagataatcacctcgaacgaagtcctgacgcgtgtcgtcgatgaaaccggactggccaacgaccccgagttcaacggcaaaggcggcctcggctcgaagatcaggtcgctgttcgggatggggtcatccgatccgcccgaactgacggcattgcggaatctgcgcctgaagacggcagtgaagcgaaacgaccgctccttcgtcatcgacatcatggtttccgcggacacggcggcacgagcaacaaggctcaccgaagccgtggccaatgcttatcttgaggagcaagccaaggcgaattccaccttcaatcgccgcatttcagaggcgatcacctcacaactggcgcggatgcgcgatgcagtgagccagtcggagcgagctgtcgccgcttacaaggccgccaacaatctggtcggcacccgcaacaggctggtgacggatcaagagctcgacgaagccaatacccagctgaccaatgccaaggccaagctgagcgaagcgcaggcgcgcgtcaaactgatcgatgccatcgtctccggcggcgcaggcctggaggctctgcccgaggtcgtgcagtccggtacgatcacacaattgcgcgcgcgagcggcggacatcgtccgcgacgaagcgcagctggcgcagatcaacggtcccaatcaccccgcgctgcaggcggtccgggcgcagcttcgtgacgtccagaccgcgatcaaggacgaggtcaagcggatcgccgaggcggtccgttacgtcgcgacgagcgagcggacgaatgtccaggaactccaggcgcgtttcgattcgctgaaggcgttgtcgcagacgaacgacaagatcatcgtgccgttgcgcgaactggagcgcaaagcggactccgatcgcgcggtctatgagatgtttctggcgaaagccaagactgcacacgaacagcaggtcgtcgacaccacgaatatccggttgatttcccctgcgtcgccgccccaacgcaagagctggccgccgaccatgatcatcatggccgcggcgctgttcggcgggttgacgctgggcgttgccgcggccctggcgcgggacagtcttgctgcgcgcggccggcgactaccaaagccgaacgaggtgccgccgggaccggatgaggtgccgccgagaccgatcggaaagcgcatcgacccgtcaacgtcatcgctgcactccatcctccgtcctgccgcggcgagtcgccaagaacagttgtcgcgtctttcggcggaactgctcgcagcgcctgcgggccgttccatcctgctggttcgcacctcggaagaagaatcgctcagcctgatcgcactggagttggcgcgcgccgtcgccgagacggaacagaaagccatcgtcatcgacgccgatctgatgcagcacccggtcacatcgcgtctgcgtttcgaccagcggccgggaattcgcgatattctggccggcacgtcgtcgatcagcgatgtggcctgtccgctgggcaagaccaacatcaaaatcgtccctgttggcctcgcggcaatggttccaccggatgaccggatactgaacacactctccgaggcgctgaacgaggcgcgcgatttcgatcgcgtcatcatcgatggcggcgaactcggcagcacgtcgtccgaatacggactgtacgccatggctgacgaagtcatcttcctggcgtcgaccggcgatagcaggatcgatgacgtcctggttcatgctgacttgttgcgacatcatcggatcaaggcgaggacgatctttatcgaacgcaacgcagaggcgctggtcgcgtgagcgcgaaagggcacgtcatcggcgacgtgaattcgacgtcacgtccagcgtcgctcgatggaactattcgactcggcttgccttttgccggccccgcattcgaaagatgcaagccgtcgatgttgttccgctattcttcgtatccgcaaatgtcgggattttctcttcctgtatgaggcgttcaagcggctcgagccgcgtgtggtcatcccgatggcaaatctgctgctttgtcttcgccatcctcatgatcgctgtttcaacgctgttccgcagggaggatgtgcgaacgcagtgtgtgagctgaggtgagacatggccggacttgcgctggaccatcacatggatccgccagccatcatcatgcgggcggccgacagccggggcgcggcgcaggcagggcgacgcctgcccgccggctttttgagcacagcggggagtcagatcgttgacaacgccggccgcaacgtgcgcatcgcctcgatcggttggaacggcaccgacggccgccctggtgcaacactctccggcctgtggcgcgtcagctacaagaccgtcctggactccatcgccgcggccggattcaacaccgtccgcatcccctggaccgacgcgggcctgaatgcacccctcgacggctacaaggacgagctcggctgggtcaacgcgacgttgaaccatgatctggtcgcaagtcagtctcctgacccggccgggcgctacagatttgtgacgaccctgcagctgttcaaaaaggtcgtcgcttacgccggacagatcggcctgaaagtgattttcgaccatcacagcaaccaagggacggcagggcagcagaagaacggtctttggtacgacctcgggccgggatcggatgggaccgacggggtcatcaccggcaaggtgaccgcggaaacgttcaagcggaattggcttcagatggcgcggacattcgcaggaaacgcgacggtcatcggcttcgatctgcacaacgagccgaacggcgaccgggggcacatcacgtggggagacggtgggccaaccgatatcaaggccatgtgtgagagcgtcggctcggcgatacagtcgatcaacaacggtgtcctgatcatttgcgaggggcctgaattctacgcaccgccgccgccggcatcgggcatggatccgagatacgccgcaccggcgggcaatttgactgcggcgggcgccaatcccgtgagattgccgattccgaacaagcttgtgtactcggttcacgaatacccggatgaggtttccgacattgcccgatgggggctggccgaagccggatcggactacgtcgatcgaatgaaccgcacctggggatatctggtgcgagacaatatcgcgccggtatggatcggcgagatgggatcgtcgatgaggacgcccgtcagccgagattgggcctggacgctgatccgctacatgaacggcgaatatgccgatcagggcggcccccgcttcgacgtaggtcaacaacccatcagcggcagctggtgggtgatcggtccatccgatgatccgccctatggtctgcagacgagttggggaatcggaaactatcgtcccgagcagcgcgaaattacggatcgcatgttgatgcggtaggctaagctggccgaattatcgcggcaacgacggccgggttgatttcgggccggttctcaagatgccgtccaggtccagcgctttgtcgaggtcatcccgccgaacatgcccccgtacgaaagaacaaacgcctctcgtgcgcagggacgtccgccgttcagccgatcgcctttggggcggcgtttctcgacggcgctgccatgggtgttcgttctcggcatcgccgccggcagcatgttgccgatccgccgctgggcgcctgaatgggtgcctttgccgtcgcactggtcgttgagccggtcgcgcgatgccgatgtgatccggcagcgggccggcgcacctgacgttcgccatgctgtcgatgtcgtcaggacgatcgatggcgacacgttcgaggcgcgggtgcatctcgcgccggggcccgatctgtatacgcgggtccggctgcgcggcatcgatgcgccggagctgaaggcgtcttgtgcgcgcgagctgcagatggcgcaggcggcgacggtggcgctgcgcgatctgctcggccagggcgatgtcacgatctacaatattggtcccgacaaatatcagggacgcgtcgtcgccgatgtcgcgacgaagaagaccgacaacgtctcggcggcgctgctcgctgccggccatgcgcgcgcctacaacggcgggcaccgcttcggctggtgcggatacttcgggcgctaaacaaaaaaaagccgcgcatcggcgcggcttttcggtgaaacgctcgcgcaatcagcgggtgacgacgacggtcgtgccgaccgagacgcgcgaatagagatcggtgatgtcggggttcagcatgcggatgcagccgtaggagacgaagccgcccaccgagcccggcacgttggtgccgtggatggcgtattcgccgccggccagcgtcatcgcggcgacgcccatcgggtttgccggcgaaccgccggcgatcacgttcggaatgctcggcttgtcgcgcttgacttcggcgggcggcgaccaggccgggttgcgatacttgccgtcgatccgggtggtgccggcccactgcttgccggacttgccgacgccgaccgggtaacgcatcgcgtggccggaatcgagaatgagatagagccgccgttcgttggtcttcaccacgatggtgcccggctcataattgtcagcgtggatcccgaccatttccggccgtgcctcggccgtctgcgacatcaagacaacggcaccaagggtggcagcgaacgccaccgcaaacttcatcgacatcaacctctccacttcccaacagctcccgctggggagccaaaaaccaagatgcagagccctgaaaaaaccgggcccgccggtctcgcgcacgcaatgttaaccgcgtgtcttaaccgggtggtttcacgccggccgcgagacacgtccagatggcgggcagaaaaggaaaagttgggatcaaagtaaatgacttgaaaacaacacttggccacaaacgcgccgcactggcgccttgcctctgacaatcccgtgaaatggccgattccagcgcgttttcgagcgacgtggagaatgcgaaaggccgcggcagtgatcgcgcgcggcccttcttggctttccgatactgtcgtggctggcctttacgcctacgcgcccttcttgttctgccggttctgcacgaggtcatcgaccacggcgggatcggcgagggtcgaggtgtcgccgaggctcgacggctcatcctcggcgatcttacgcaggatgcggcgcatgatcttgccggagcgcgtcttcggcaggccgggcgcgaactggatcagatccggcgaggcgatcgggccgatgtccttgcggacccaggcgaccagttccttgcgcagcgcctcggtcggctcggtgcccttcatcagcgtgacataggcgtagatgccttggcccttgatgtcgtgcggatagccgacgacagcggcttccgacaccgcctcatgtgcgaccagcgagctctcgacctcggcagtgcccatgcggtggcccgaaacgttgatgacgtcgtcgacgcggccggtgatccagtaatagccgtcggcgtcgcgccggcagccgtcgccggtgaaatacttgttcttgtaggtcgagaaataggtctgctcgaagcgcgcatgatcgccatagactgtgcgcatctggcccggccaggatttgatcaggcagagattgccagaggtctcgccctccagcgtcttgccgtcggcgtcgacgatctcgggcaccacgccgaagaacggccgcgtcgccgagcccggcttcagcttggtcgcgccgggcagcggcgtgatcaggatgccgccggtctcggtctgccaccaggtgtcgacgatcggacagcggtcgtcgccgaccacgcggtggtaccactcccaggcttccggattgatcggctcgccgaccgagccgagcaggcgcagcgacttgcgcgaggtcttcttcaccggctcgtcgccgccctgcatcagcgcgcggatcgcagtcggcgcggtgtagaagatgttgaccttgtgcttgtcgaccacgttccagaaacgcgaattgtccgggtagttcggcacgccctcgaacatcagcgtggtcgcgccgttggcgagcggcccgtagaggatgtagctgtggccggtgacccagccgacgtcggcggtgcaccagtagacgtcgccctcgtgatagtcgaacacgtattgatgcgtcatcgacgcgaatacgagatagccgcccgaagtgtgcagcacgcccttcggcgttccggtcgaacccgaggtgtagaggatgaacagcggatcctccgccttcatcggctcgcacgggcattcattggtcaccatctcggcggcctcgtgataccagaggtcacgcgtcggattcatgtcgaccttgccgccggtgcgcttcaccaccacgacccagtcgacgccgccgactttttcgatcgcggcatcgacattggccttcagcggcaccttcttgccgccgcgcaggccctcgtcggcggtgatgacgaccttcgaatcgcagtccttgatgcgctgggcgaggctgtcgggcgagaagccgccgaacaccaccgagtggatcgcgccgatccgcgcgcaggccagcatggcgtaggcggcttccggaatcatcggcagatagatcgtgacccggtcgcccttgccgacgttccgggtgcgcaggatgttggccatcttgcagacttcgtcatgcagctggcggtaggtgatgtgcttggactcggagggatcgtcgccctcccagatgatcgcggtctggtcgccgcgcttctccagatggcggtcgatgcagttccaggcgacgttcagctccccatcctcgaaccatttgatcgagatgttgccgggcgcgaaggagacgttctcgaccttggtgaatggcttgatccagtcgatccgcttgccgtgctcgccccagaagccgttcgggtccttgaccgagcgcgcgtacatctcgcgatattttgcgtcatcgacgtaagcacgcttggcccaatcggccgacacgtcatagatcttctcggacataggtttcctccactcatgccgatcgcgaaccacgcgacggcaagccgtcttgatcattgttgcaattatgcgttgccgcgttccggcctcgcaaggaaaaaggactgtcactttcgtcgcgcagaaaccgcaggacatcccgccggcttccgcacctgataggacgcttaccgcgcctcgttgacgatggaaacctatgctccatcgcctgcatcaggtcaccggtctcttggtcgtagtagtgctgtgctctgcgcctccccgccacccaccgcgacaaactcgaacgacgtacggcgtcgattttgacgggcggctttgggcattcaacgaactgtcgtgtgccggcgcgatgatctgcgtcaacaatcggtccttcggcgtctcgcgcggcctaacggcgcccgtcgaggcacttgttgctgcccgcagcctaggatcgagggcgtcgccgggacggcacgatccggcctgtccggtgcggcagatcgtccgagttcggcccatcggaatccggttcccggacgctgttcccgctattttgaccgaacccggacaggctgaaatcaaggttagccggcgaatggcacccatgaaaggtatttagaaaccattgataaccgattcgcgactcgcaatgtcagtctccacgccctaaatcgccattccgaggccggacggcctcaccggaacgaagcccgaagcaacggcattaccgggagaacagcggaacaaggcgtctgaagagtatgatggatcagcagaacatcgcggctgtgcggcccatgtccgccgatcccgctgtcgccctggcgaaggcgctgggtcagtggcccaagcagccgcaggcaaagttgcggccgcaggcaaagctgcagccacctcgggcaaagctcaagttcgagacgcccgccgccatcaagacctcggtcgaggatctggcgcgcgatctcggcctgcggctcggcgaccagaacgagctgaccatccgccgcatcaagcgcggcaagacctattcgttcgttcgcgccaatggctcgcgcgtccgggacgcccgcaccatccgccggctgcacgcgatggcgatgccgccggcctatcgccaggtgcgctactccaccgatccgaacacgcatctgcaggcggtcggcctcgatgcggccggacggttgcaataccgctatcatgccgattgggagaaggtccgcgagcagcgcaaggcgcaccgcctgggcaagctggtggccgcgctgccgaagatccggcgcaaggtctcggcgttcctgtccggcgacgagccgacgcgcgagttcgcgctttcggcggtgatcgagctgatcgcgcgcaccgcgatccggcccggcaacgaatcctatgcccggctcaatggcacccgcggtgccaccacgctgctgaagtccaacgtcacgctggaagacgacagcctggtgctgaccttcaaggccaagggcggcaaggccgtgcgcaaggaatgcgacgcggccaagctggtgcgtgcgatcggcatcctgcgcggcgttccgggcaagcgcatgttccagtattacgaccgctccggcgtcgtccgcgcggcctcgaccacggctgtcaacgcgttcctgcgcgagctcgccggcatcaagatctcgctgaaggatttccgcaccttgatggcgtcggccgtcgtcgtggaatcgctgtcgcggatcacgccggccgccagccagcgcggccgcaagcgccaggtgctggacgcgatccgcgccgcggccgaccagctttccaacacgccggcgatctgccgcaagagctacgtccacgacaccatcgtcaccgcgttcgaggacggcatcctcgagcgcttcgccgcgaccatgggcggctaccgcacccagagcaagcgcgagcaattgctggcgcaggtggtgatggcggcgggggcgtaagcccagaatccaactcgacgtcgtcccggccaagcgaagcgcgagccgggacccataaacacaaatgttcagtatgtagaacgctggggccacacctctgcgcgacacagagagttgtggttatgggtcccggccttcgccgggacgacagcagagtatgctggaacgctacagtccgcccatcttgcagacgtatttccattcctccgcggtcaccggctgtaccgagagccgcgaatatttcaccagcgccatgtcggcgagcttcttgtcggccttgatcgcggccatcgtcaccggcgtcttcagcggcttgtcggccttgatgtcgacgcagacgaacttgccggtcttgtcggtcggatcgggataggcttccttgacgatctcggcgatgccgacgatctccttgccctcgttggaatgatagaagaacgccttgtcgcccttcttcatgttgaccaggttctgccgcgccgtgaagttgcgcacgccagtccaggcctcgcccttcgcgcccttggcgacctgctggtcccacgaccagaccgacggctcggatttcaccagccagtaattcatcgcgactcaccccgttcctgaacgccgattgagcggcaatctacaggcagccggacgcccgcgacaagcacaggcatctggtctcgatggcagcgctcactgcttcagatatcgatcgaagaatttggcgatatcggtgaaggcttccttggtctcgggcgcatcgatgttcatctggtattgcgcgtgggattgcccttcatagacattgaggtcggcgatcacgccggcgcggcgcaatttgcggtgggtgcgaaccgtgttgctgaggaacaaatcgcgcgtccccgacgtcaggatggtcggcgggaaacccttgaagtcaccgtagatcggcgagatgtagggattcttcaggctggtcccgttggcatagagcctggccgcgcggccgagccagccgtcccaggtcaccagcacattgtcgacccactcattgccggcgtagctgtcgccgatcttgtcgatatcggaccatggcgtgcccggcgcgatggcggcgggcagaggcagcttctcatccttcgcccgcaacaccatcgcgagcgtcatcgcaccgccggtcgaggtgccgaagatcgccagccgatggcgctcatgcgatttcaggacctccttccacaccgccatcgcgtcgtccatcgcggccggataggggaagtccggcggcatccggtagtcgaccgagatgaccttgtagccgccgaagcccgccatcatgatggcttccggcagcgcggcttcgccggggccgaacacgtagccgccgccgtgcacatggatcagcaggcgccgccggttctcgagcgcgatcttgttcggcgtcacgacatagcagtgcacgccggcgattgttttctcctcgaccttgacgccgagcttcgccttcatcgccgggatattcgcgatggcttgcttggcgcggcgatcgatcagctccttccattccgctgatgtcttcgggtcggcgttgaaatgcggcggataggccgtgccgatcatggcctgcatctcgggagagacgtcagcggtggggttaccgatcgacttgagcggcgcgacccgcttgccgctgtcggcattggcggccgcctcactcttggcgagttcgtcgtaggaagcggcggtttgggcgtgggcagtgatggacgaggcggcgagggcgaatgcgaagcagatgggaacgatggcgcgttgcggttgacgcatgtgtttttcccttgggatccgttgctcgactgctaagaccgggatccgacggttcgccgccacgctagtacggcgcgcgcggatcgtgaagctccacctcgcgcacctgtgacgcgcgctactcggccttgaaaggccgtgtcagcaatccttcgatcaccgcatcgatcgtcagccggccgctcaggatcgcggcgaccgcgttcgacaccggcatatcgaccttctgcgcagcggcgagctcgcacagcaccggagcggtgaacgcgccttcggcaagcttgccgaccggcgctgcttcgccgcgcccgagcgcgaggccgagtgcgaaattgcgcgattgcgcggtcgagcagctgagcaagagatcgccgagccccgacaggccggacagcgtctcggtgcgcgccccgcaggcgcggcccaaccgggcgagttcgctgaagccgcgcgtggtcagtgcggcgagcgcagaggcgccgagctccttgccgacgacgatgccggccgcgatcgccagcacattcttggccgcgccgccgatctcgacgccgcgcacgtctgacgtgtggtagggccggaacgtcgccgaaccgagcgcctggaccagcgcacgtgcaagcgcctcatccttggcagccagcgtcacggcggtaggcaatccgcgcgcgacgtcgtcggcaaagctcggtcccgacaggatcgcgggcaccgcgcgcggtgcggcctccgcaaccacctcggtcatgaacttgtgcgtgccgtgctcgatgcccttggcgcaggcgatgacaggtgtgtcgggttcgaggtacggcgcaaggtgtccgaccgccgcgcgcagatgctgcgccggggtgaccgcgaggatgatgtcggcgcgtgcggcggcggagatatccgacgtcaccgcgatgccgggctgaagctggacaccagtcagcttcggattgacccgcgtcgcctcgatccgcgccgcatgcccggcattgcgcgcatacagcgtcaccttgcgtccggcgcgcgccgcgacctcggccaatgccgtgccccaggcgccggcaccgatcacgctgactgacatatgcgcgggcatccgacccctcggttcaatatccggcgcggctgttggcgtggccggccggcgccttggcgttggcatcgagcagccagcgcgcgcgcggcggcgcttccatcgtgtcggtgagtccgagcgccatccgctcggcgccggcccaggcgatcatcgcgccattgtcggtgcagagcgccggcggcgggatgatcagcgtggtctgcgctttcgccgcgacatcctgcaacgcgctgcggatggcgtggttggcggcaacgccgccggccgcgaccaatgcgcgcggcgtgccgaaccgttcctggaacaaccgcaggccgacggtcagccggtccgcggtcgcttccagcaccgcggcctggaagctcgcgcagaggtcgctgatgtcctgcggctccaatggctccagccggctcgcctcgttgcgcaccgccgtcttcagtcccgacagcgagaaattcgcatccggacggccgagcatcgggcgcggaaaggcaaaccgcgtcgggtcgccgtcggccgccgcgcgctcgacctgcggtccgccgggatagggcagcgacagcatcttcgccaccttgtcgaacgcctcgcccatcgcatcgtcgaccgtggtgccgagccggacatattcgccgaccccgaccacggcgacgatctgggtgtggccgcccgaggccaagaacaggcaatagggaaacgccagcgcgcaggtcagccgcggcgtcagcgcgtgcgcctcgagatggttcaccgcgatcagcggcgtgtcgtgcaccatcgcgatcgccttcgcggtggtgagaccgacgatcacgccgccgatcaggccggggccggcggccgctgccaccgcggacaattggccgtagccgacgccggcctccttcatggcggaggcgatgataccgtcgagcaggtcgacatgggcgcgcgccgcgatctccggcaccacgccgccgaagcgggcgtgctcgtcggtctgcgaacgcacgacgttggagaggatcttggcctgtccgtcagcctggcgctcgaccacggcggctgcggtttcatcgcaggtggtctcgattcccaacaccagcatcggcggttcgtgtcccaatttcggcccttgtgctaccagcatgatccggaccggccggaaccggtttccggccagatcatgcccatcaaatgtcctctccggggtagcattgcgaggtcgcaaagtgcaatcggtcgccaaggaccaacaaggtccaatctgcaggggccaattcgcaaggcgggaggcctgaccctgaccatccttgtcacacgaccgcatccggatagtgccgcgacgcttgcgacgctgcgccagcgcggctttgatgccctcgcggcgccggtgctgcgcttcgagccgttgccgttccatgatgacgacgatgccgaatatgacgcggtcatcctgaccagcgccaatgcgctgcgcgcggtcgatctcggtgcgagccggctgatgccgctgccgctgttcgcggtggggacgcacaccgcggacgccgcacgtgccgccggcttcgacaaggtgatcgtggccaagggcgacgcggtgagcctgcgtgatctcgtgctcgcgcgggtcaaggccggcgagctgccggcatccgccacgctgctctatctcgccggcgccgacctgtcgcgcgatctcgccggtgaactgggcgagcgcgggttaagcgtcgtcacccataccacctaccggatggcgccggtggccggctttccaagggaggtcagcgacgccttcatggcgaaccggatcacagcggtgctgcattattcccggcgcagcgcgcaggccttcctggacacgatccgggccgacggcctggagatttcggcgctcgctttgccgcagtgctgcatctcggccgcggtcgccgcggtgctccatgacgccggtgcgaccaaggtggtggtggcggcgcggccggacgaaaacgccctgctggaggcgctcgaccgcacaatgcggccgtcactcgaataattctttcgtcggaccatgatgttaggcaatgctccgggtttcggatcgtgctctaagaccatggccgatcctgacggagcggttcgcgttaaggtaacgccaccaaacaactcgatgacggcatgatccgattcaatcggatcggatcatgctctagaatgtgcggccagtagttttgaggaccctcgcgatggctgaagaaaggcccgacgacccaggaccttcgccggattcccggcccaagcgcgcaccgccgaccattgatcttcaggcgaccgaaatctccagcgagccgtcaaggaccgaggcgaccgaggaagccgccaaggaaattggcaaggaaactggcgaggaaaccgctggccatgccggcgaggcggctgcgcccggggcggagcctcatcccgatcctgcgcctcacacagagccgcaactcgaggccgcctccgcggcaccggaggccgagcggccgcggccggtgtcgccctgggtggtggcgccggtgtcgggcgcggtcgccgccgcgctggtgatcggggtcggctggctgctcggctggccctcggtgccgccggcgtccgcgccgcagcccagcgccgcaacggttgacgaactcggtgcgcgcctggccgcgctcgaagcaaaggcgagccggccagccgctgcggtcgccgatcccgcggcaaccgcaaggctcgaggcgctcgacaagtcgatcgccgtgctgcgtaccgagctcgccgcgacgcgggcgcaatccgacaagctcgccgctgcggtgaatgacgcgaaggccgcgccgcgcgatggcgcggcggcgcccgacatctccggcctcacggcgcggatcgacagggtcgagggtgcggtgaaggcgcagggcgccgcgatcgccaaacaggacggcaagatcgccgacaccaaggccgaggcgaaggcggatgatgtgccgctgcgccgcgtggttgcggcctcgctgctcgacgtcgcggtgcgtcacggcgatccctacggctcggcgctcgaggccgcgaaggccatcgccgacaatcccgatatgctgaagccgctcgaagtcttcgctgcgtcaggcgtgccgaatccgaacgcgctgtgccgcgagctgatcgagatcgtgccgcagcttgctccgccgccgccggaggccgcggccgccagcgccgggctggtcgatcgtctgcaggccggcgcctccaagctgatccgcatcgagcggaccgacggcaccggcaccgaccgcggcagcatcgtcgcgcgcgtgacatcggccgccgtgcataatgatctcgcattgaccgaacgcgaattgaagtcgttgccgccggccgatcgcaccgcggcgcaagcctggctcgccagggtggacgcacgccgtgccgcgctcgacgcgtcgcgtaaatttgccgacaacgccatggcggcgctcgccacggtcaatcaatagcttcttgcaataggttcttgatgatccggatcattctgttcctgctgctgatcgcgctcgctgcagcgggtgccgcctggttggccgatcagcccggcgatctcgtgctgaattggggcgggttgcgtctgacgtccaggcagccgatgtacctgctcggcctcgtcatcgtcgtcgcaatggtcgccggcatgatcctgcgcggactgtggaagatcccgggccgcatccgacgcggccagcgcgagcggcgccacgcccgcggccgtcacgccatcacgcaaggcctgctcgcgatcgggcatggcgattcgtcggcggcgcgtgcccatgccgaggtggcgcggcgccacgccggaggtgatccgctggcgctgttgctgcacgcgcaatcggcgcagctcgacggcgatcgcgacggcgcgcagcgcgccttccgcgccatggccgagcgcgccgacacgcggctgctcggcctgcgcggcctgttcatcgaggcacagcgcgccgacgatccggtggcggccgtgatgatcgccgaggaggcgctgaagatgtcgccgtcctcgtcatgggcctcgcatgcggtgctcggcttctgctgcgccaagggtgactgggccggcgcgctgtcgatcatcgacaacaaccagacggccggattgatcgacaaggcgacctatcggcggcagcgcggcgtgctgctgacggcgcgcgcgctggagttggagaccgtcgatcgcgacctgtcgcgctcgagcgcgatggaggccgtcaagctggcgccgacgctgatccccgccgcggtgctctcggcgaagttcgagagcgaggcgcatcaggtgcgccgcgccatgcgcatcgtcgagaccgcgtggctcaagcagccgcatcccgatctcgccgacgcctattcgcatgtccggctcggcgattccgcgcggcagcggctggtgcgcgtcgagacgctggcggccaagacgccgggcaacatcgagggcgcgctggcgatcgcgcgcgccgcgatagatgcggccgaattcggcaaggcgcgtgcggcgctggagccgttcacagccgcgccgacccagcgcgtcgcgctgctgatggccgagatcgagcgcagcgagcatggcgacagcggccgggcacgggcctggaccctgcgcgcggtgcgcgcgctgcatgatccggtgtggactgccgacggctatgtctcggatcgctggcgtccggtgtcgccggtcaccggccgcttcgatgccttccagtggcagacgccggtggcggcgctgccgtccgacaagggcaatgcgatcgagccctcgccgttcgaagaggcgatgctggcgccgcgtcgggtcgagccgcccaaggagctggccatcgagccgccgtcacccaagccggttgagccggtcgaggccaagccggtcgagccggccacgccgtccgtgcaggacaacgccccggcgccggcggccagcgacgccgagccggtgccgcctgaacccgccgcgccggagccggttccacccccggccactgaggcggcgcccccggccccggccccgctgttccggtcccggactgatctgcccaaggcggcgccggcgccgattccggccgtgattccgatcgtccgggctcccgacgaccccggggtcgatgaggacggcccggtggacgaatttgcggaacaaatcggccctcccaaggcccaggcgggcggttggcgcggatttctgtcacgtttgggaagctaattcggggttaggtaacggctgtgcggtttaataaccgcatcttcttgccaatcggggtcatgcccgatatcaggtggcgcgcaagctcaggccgttgccgaacggttcgccgcaatagctcagttggtagagcacgtcattcgtaatgacggggtcgggggttcgagtccctcttgcggcaccattctcagactaagcccttcaattcttgcgatcttccgggcggaaattgtttctccgtgtaggtgctgatcccaatcctgctacacggcggagtgtggatctggtggcgcacgagcttggtcaagttgggcgccgcaattactggatataccgtaaacgcgtcgaccatggacgcgaccgcagcacgagcctgaccgatgagcagcactcagaccgaagccgagattaggagcggcttgaagcgcgggaaggtcatactgccatggagcttgctccggtcggtcggcaattcgcgagccgcaaagctaaccgtgctcattccgctgatcggctatttgatcttgctgaatgacgacatcgttgcgcatcttacgctgtcgaaggatgtgtttgacgacgctgccgaccatacattgacgcgattgcttgcagtttatgtcggccttgtattcatcgcgattgcctcagccgtattcgcaatacgatgccccggcgaagtgaagcggtatggctctcccgaagagtacatcgcgggcgacgaaccgtcggtgagcgacaagcaaatagcgatcatcgaaaggaaattggaggtcggcgacgatatcgcgcgcaaagacagtagcgaatatggcgcgtactattttggcaggccgaaccctgatctagaggaactgcggcggaacggacgcgaattgcttcgcatacgaatgaacctcttctatgagatgcttgaccggtctcgcccgatatctcgatggatcgcggcaattttctttctcgcggggtttatctgcttgtcgatcccttcgatgcttgtgtttatcaaagtcagcaaggttttgtttcacaagatcggtgcttaaggatgtcaggacctacatcattggatcggcgctactcgaagatcattggtgtccgctcaggatcgaaatgaaaaagctttattgtcggtacaacgtcatcggcactcgcggtcatttttattggtccatatacgtctgtgccacacgccatccccgccacgataggcgggttgtaccaccgccgtatcaaaacaagcgcctcttctccgggatttaagtcgatcagatgctttttgttgatgtcgaactgtgacggctccggccgagtaggcatcggtccgattgcttcgacgatgacctttacgttcctttgagtcttggcggacatattccttatcagcgctcgatactcccaaaacgttccgggtatttgctttccggtttcgtccctcatcggttcgattgaccaaaaccttctattgggattagcttggtcgaaaatgatcttgatcggccgctgaactagtggaaattgtccgaatatctggttcctagagaacctgacgccgacccacgccattgggccgaactcgcggcttgtgggacccttccagtgagccgcagtccgtggaagatgactacgatcaaatacgatctcaactttgtcccacgtgtccggagggataggcttttctggggtagtggccgttcctgctaagcattcctcgccccaagaactgagaagcgagtttcgcagagctttatggatttcgttgtcgagccgacgcgcaagccagtcgtaaacgaggttcgaggtatcaatggttgtttttaattgactctcccgccactcgctttcctcgaaaatcagaaaaaatgcttctcttgcatcgatgtccggcgcagggtcttgggtcggtgcaacttggcgttgtccatgcaattcgatttgcgatcgttggatcagtacttctcgttgacgaagctggtactccggaatggccatgccgcccctatcaaaatgggcttcggacggctctcggcggagatagtttcggaagcctacgatgatattgaaaagcttacgtggcatgtctgcctcggataatgggcgtatcagagctattaaggtaagaagtccgttagacaccggtagtgggcctttgtgttctagctgatcagacctccctcgccagctatgcgacgtgcactaacgtcgagacagtggcgcgctgctctgatggctctttcacgatccgaacctcttagcagtcgctggaaacgcgtcctgcgccactcctcaatgcgacgaaggcggcctcgtcggccacccagcaacactgacccttccaagctctcgcacgccacggtcctcccgctcaggttgaaagcgtaacggaactcaccgtaggcgcaagctccgtgcctgctcccgccgccccgcagtttctggtgattacgggcgctgatccttgctgaaagtcagcaaatcacttagggaggatttcgcgcgtcgagttctgcatcagccatgcacatgttgttaacaggtgtctccgatggcctctgctcgcgaaatgctcgctgtcagcagcgatccggtcaaggtccgtaaccttgccctcagccttctcgcgatgaggaaggtggctgaaaatctcttcagtgagtgggagttgacatttctgctcgacactgtcgagcaggcggaaaaggttatcgcgctcagtccaaaggagcgcaaagacctcaaatttagcgagaagcacgctgaggcgcgtctcgcgttgcgcgactttcgcctcacctcccgacaggcagaaaagctgttcgaaattcgcgacggcgttaccctgtacggtgacattgctggcatcagcgttcgcaacctgatcgtccgatgctacgaagcacgtgggtgcggactcgtagagagcgatgacgaatatatcgagggcctttggaagagtggggtgaccaagcttcgtcttcgcgatctcatgcggctcaagaggtgcagcatcgaactcaacgagctcgagccctacatgtaaggctgcgtgatgagcacccagggtcagatttcggattaatctcggcagttcaattttcgctttcaatggtacacgatccccggcacgaaactcgcggatcagcgcgtttaggcggaaaatgctgggtttggaggaggggtttcgttcccttcttgcggcaccccagaacatcttccacctagatccgcgcgccgcacagtccactcgcgaccgcgaccagtccgaccgcggcgaggccggttgcccagatccggttggcgatcgcggtggccgcgccgtgcgcgatcaggacgccgcgcaatcccgaggtgagatgggcaaggacgaagaagacgccgagcgcgtagtgcgacaccaggcggatgctccaggcgtcgtggatcaggccggtcggtgcccccgacgcacgcgcccaattggtatctatgtggttcacggcccgcgcggagacgagtgcggaattcagatgggttacgatgaacgccgggaggtacacgccggagccgatctgaaacacgcatccgccggccgcgctccagcgccaagccagccgcatgccgacggcggcctggaacggcatcaaggcggcgaggattggttcgatcacggaggagcgatagaccgtgcgtcctatcttcatcacggtgccatgcatcttgggcccgagcagcccgacgggtcaagctgccttgtcgagcgccggcacccgccagctcctttgcatggggttgtttcgatattttggctgcgtacatctgaagcaggaatttcgccaccattgcccgtggtgatctgccggtagtcgacgccgacaccacgaacgaaagcgcccccggatcggatccaggagcgcccttgggttgagtgtgttcggcgtattcgcggggttactcggccaccgtctgcacgacgttgccgatcggccggcccgatgcgaccggcttctcggtcttcgccatcatcgcgtcgtattccggcagcgtctcgatctgggtcttggccttcatccagaccaccttgtagccgccggccttcagcttgcgcagcagcgtcggcagcgcctgtgcggtgtgcttctgcagatcgtgcatcaggatgatgcccttgtgctccttgtcgagcttggtcatcacgttgttgatcacttcgtcggagctcttggacttgaagtcgttggagtcgacgtcgaccgagaacatcgcgatgttgcgggtgccgagataggcggtggtcgccggcgtgtgcgccagtgccgggaagcggaagaacggagccggattggcgccgagtgccagcttcaccgcgctaaaacccttctcgatctcgtccttggcctgctgctcggtgatcttcttgctcgccagatgcgcgtgcgaccaggtgtgggcgccgatggtgtggccggcggcggcgacctggcggaggatatcggggtgataggtggtgtgcaggccgatcgggaagaacaccgccttggtgcactcgtccgccagcgccttgagcacggcgggcgtggtcggccacggaccgtcgtcgaaggtcagcaccacctcatggtcggtcaggaagtcatattgcttgtactgcaggaagccgaagcccgggccgcctgtggtgtcgaccacgacggtgcggctgatgccgagcccatcgggattggcgcattttggcatcgccacgaccggagcgggcgccggtgcaggggcagcggccggggccgccgcctgggtggcgtcggcgcgcttcgagagcgcggcggtcgtgtcgacatcgtctctggcggcctgcttggccgctgtgggcagcggatcggcctggcttgctgccgttgtctgcggaggcgccgcgtcggcacgcggggaggaggtccagaaccacacgccggcgatcacgatcgccgctacaacactggccagcatcaggcccaacgcactacgcatcgctacacactctctcggacttaaggatacgccacagccgtaacgagcgattaatgccaacaaggtcttaacgcgatcccaacaaggcgccaggaccgcaagaaaaagcgtgctttaccgatgcgtgatggtcgtcacagtcatcgggtgcgcgctcaagcaggatcggacatcagacaacgggcgccgcgatcggtggcgccgatgggagccgatcatgaccaccattttcaaaggccgggttcttcggggcggagcacttggacgtggcgttcgcaggaccgccgtcgtgctggcggttgcggcgagcgtctcgtcgctgacctcgagcgcgagcttcgcattcagcgccgaggcgcagcagatgtgcaccggtgacgccttcagcctgtgcagctccgagatcccgaacatcccgaagatcacggcgtgcatggtcaagaaccgctcccagctgaccagtggctgccgcgtcgtgctggatcgcgatctcgcggcccagcgccgggccgccgccgagtgattgcagtgcaccaatggacttcgccgtgggcggcgaagccgcagggcttctttgccgccctgaaacgctatagaaccagcgtcgcattccttagaggctttgtgatgacccgatttctgttcgccgccgttccgctggttctgctgacgtcagcggtctcagcacagcagcaggggcgcgatgcctgctcgcgcgatgcctcgcggttctgccgcgcccatctcggcgagggcgatcaggtcgtgctggcctgcctgaaggagcatcgcagccgtctcagcaaggcctgccagcagacgctcaccgacaacgggcagtagcgccatcatcgtcattccggggcgcgccgcctggcgcgagcccggaatccattccaacgctggactcgcggcccgatggattccgggcccatcgctgcgcgatgtcccggaatgacgacggagtctacgtactactccccgccgcggtcgcgaccaccgggatcacctccttggcggcgcgatccggggtctcgtccttccagcggaccgagccgaacggccgttccagcatccgccgcacccggatcggatccgcgccgatatggaagtcggccgccttctggtgcagctcgcgctcgatctgggtggcgcggttgcgctggcgcaggaaatcgagccaggtcgggcaatgatagcgctcggtccacaattcgggatcggcgatgtcgcgcgcgatcgaccagccataggcgccgttgcgctggcgactcagctgcacgtcctgcatcacattgtggaaggcgcgcgccttgtcctgcgccacccggtactcgatctccaccaccagcggcccgctgcgcgcggtcaattgcagccgcacctcgggatcggccagggcaaccgtcgcgtcctcgttgcgcgcgccgaccggcggcatccgcagccagatgccgagcagcggcgacagcagcatcaggccggcggagatcaacagcgccgtctcgacaccaccgaggtccgtgatgcggccccagcaccagcttccgatcgcaatgccgccggcgatcgaggcctgaaacgccgcaagcgaacggccggcgacccagcgcggcgccgagagctgcacgccgatattgaacagcgcgatggccagcatccataccgcaccggcgaccaccagcgcggctgcggtgatcaccggctgcttgctcaccgcgacgatcgcgatcgcaacgcccatcagcagcgcgcaggtccgcaccgcggcctcgccgctgagccggctgcggatctcgctgatgttgagtgcgccgatcacagcgcccatgccgaaggcgccgagcatgatgccgtaggtctgcgcgccgccatgcagcaaatcgcgcgccaccagcggcatcagcgccgagaccgagccgccgatgatgccggtcaccatggtgcgggtcagcacgatcttgatcgacggcgaattggtgatgtagcgcacgccggagacgatggcgcggttcagccgctcgcgcggcagccgcgacggttcgctgacgcgattccacaggaacagcacgaccagcagcggcaggtacaggacagcgttggccgcgaacgccgccacggcgcccgcggaggccaccacgatgccgccgatcgcaggaccgaagctgcgcgcgatgttgtagctgatgccgttcagcgcgaccgcggcgggcagcgtctccgacggcacctgctcgctgaccgaggattgccaggccgggccgaacagcgccatgccgctgccgaccacgaagcacagcgcgagcaggatgttcggcgtcaccagattgagccaggccagcaccgtcagcgtggtcgcgccggagagcgcgatcgccagcgacaccagcgcgacgatgcggcggtcatgcatgtcggcgatggcgccggccggcatcgagatcagcatcaccggcagcatcagcgcggtctgcaccagggcgaccttgtcggcctccgcggtcatctgggtcatcgcccaggcggcgccgacgccctggatcaggatgccgaggttggagagcaggctcgcgagccagatccgcctgaagattgaatgccgcaacggtgcagtgatacggtctggtcgatccggcggttcggtcatatccggttccggttggcctgctatggtttgttgaatgattccggctgcatcaactgatgcccggcaaacgcgtgtcctgtccagcgattacggtatcctcgcgggctgtaggacacagctaaagccctgaaaggcttggggaaggggatcaatggcgctgtcgcggcggagattttttcaaggagccggcgccctgacgctgctggcgggccgcctcgccgccccggcttttgcccagccggcgccggccggcgacattccgccgaccctgccgccgatcctgttcgtgcacggcaacggcgatcatgccgcgctctggatgacgacgctgtggcggatggagtccaacggcgtgccgcgcgagcgcatggccgcgatcaacttcaccgatcccttggcgcgcgccgacgacaaggtcgagcaggcgggccgttcctcgaccgaggaccagcgccgcgcgctcgccgaggcggtcagggagctgaagcagaccagcggcgccacgcggatcgcgctggtcgggaattcccgcggcggcaatgcgatccgcaacaccatcaagaatggtggcagcggcgacatcagccacgcggtgctgtgcggcacgcccaatcacggcgtctatgcatccgacgacggcctcggcaacgagttcaacgggcgcggtccgttcctgcgcgggctgaacgatggcgacagcgaggtgaccgcgggcaccgcgttcctgaccttgcgcagcgacgggctcgacaaatatgcgcaggccgacggccgcttcatcggcaagccgggcacgccgaccaacgtcacgaccgacggcccggcgctgaaaggcgcgaccaatctggtgctcggcgcggtcgatcatcgcgagaccgcgtatcatccgcgcgcctttcgcgagatctacaaattcatcgccggacgtgagccgtcgcggatcgagatcgtgccggagacggcggtgcggctgagcggcctcgtcacgggcacgcccggcggcgtgccgaccaaccggccggtgccgggcgccgtggtcgacatctatcatgtgtcggcggaaaccggcgagcgcctcggcggcccgctgcacagctcgcagaccggcgccgatggccggtgggggccggcgcaggtcgatccgtcctggtcgctcgaattcgtgctgacctcgcctgatgcggtgacgacgcatatctatcgctcgccgtttccgcgctcctccgacatcgtgcatctgcgcgccgcgcggcccatgctgccggccgatgccggtgcaggcgccgtcgtgctgatgtcgcggccgcgcggttatttcggattaccgcgcgatatcgtgctgttcgacggcaaggagccggccgacgtcaaatccggcgtgccgaccgacgcggtgacgacgttgcggctcaccgcggccgagatcggacgtccggttgccgcaatcttcaacgccgagcgcattgtgatgcggagctggccggcgtcggagaaccggattgcagtcgccgagctgacttattaggtcttgtggaaggggtccgcgcgccttcacggcgccgggatcgcatggccggatcggccgttgcgtgaggcaggaagcgaggaccatgagcatagctgaagtctacgatatcacggtcacgcggcggcccctggtcccgccggcgccgccgcgcgcccccgccgacatgggcgcgttccagcggatgcgggtgatgcgcaactcgccgatcgagacctggggccagcgcgcctatgaggacgacatcgttcagggccgcttcctcaatcactcgagcttcatcctcaacacgccggatgcgatccgccacgtgctggtcgacaattacgagaactacacccgcacgcccgccggcctccgtgtgttgcgtccgatgctgggcgagggactgctgatcgccgagggccgcgcgtggaagcatcagcgccgcaccctggcgccggcgttcacgccgcgcgcggtgacgacgctggtgccctacatgatcgcggcggtcgacgagactatcggcaggctgaagatcgcgagcggcggtccggtcgatctgcgcgaggtgatgcagcgcatgacgctggagatcgccggccgcaccatgttctcgttcggcatggaccgccacggcgccgcgctgcgcgacttcgtgatggagtatggcgacacgctggcgcggccgcatatgctggacctgctgttgcccctgaactggccgaccccgcaggatttccggcgcgcccgcttccgcaagcgctggaccgcattcgtcggccagctgatggccgagcgccgcgccgccggcaaggatgacaatgcgccggcccgcgacctgttcgacctgatgggcgctgcgcgcgatcctgagaccggtcaggccttcaccgatgcccagctcggcgaccaggtcgcgaccatgatcctggccggccatgagaccaccgcgaccgcgctgttctgggcgctctatctgctggcgctcgatccagagacccaggagcaattggaagcagaagtcaggaacgtggcgacttcaggcgcgctggacttcgagaagctgaagttcacccgcgccgtgatcgacgaaaccatgcggctttatccgccggcgttcctgatcgcgcgtgccgcgggcggtcccgacaccatcgagggccgtccggtcaggaagcatgacgtaatcctgatcgcgccgtggctgttgcaccggcatgagaagctatggcgcgatccgaatgcttttgtgccacagcgtttcatgacgggaacaccgcccgatcgcttcgcctatctgccgttcggcgtcggcgcgcgggtctgcatcggcgcgcatttcgcgctggtcgaggcgacgctcgcgctcgcgaagatcatcggcgcgttccgcgtcgcgctggcggacaaggatccggtgattccgatcggcgtggtgacgacacagccgaaccgatcgccggtgttcacgatcaagccgcgctgaccgtgcgcggcgtctcccaacataggtggtcaccatgagcgacacgcaggcccacttcgcagtcctcaggcagacggccgatccggccgtcgtcgacgccatgcagcagctgatcgctgatggcgatgatcgcgagctcaatcgcatcaacgtgctggatttctcgcgccgcaccgggctcgacgaggagaaggcgatttccggcttcttgcacgcctcgcggctcggcctgttcgacatgagctggaacgtgctgtgtccgggctgcggcggcgtgctcgatgcccacaccacgctgaaatcgttgcgtcatgacgactacaattgcgcgttgtgcgcggccggctatgaggtctcagtcgacgagctggtcgaggtcgccttcaccgtcagcccgcgggtccgccacatcgccgcgcatgatcccaacacgctgccgatctgggaatacttccgccaggtgttctggagttcagggatcgagctcgacgagagctcggtgtcgaccctgatcaatgaggtcacgctggaggggctcgagctgccgcccggcgaaaaggcgatcctgtcgctcaacctgcccaacgagttcatcatcgtgttcgagccggtgacacattcggcgcacttcttcgccatcgagggcgagccgaccaccgagcgtcagcaattctcgatcgcgttcaacaaaacgcatgcgccgaccggcacctcgacgatgcggccggggccgctgcggctttcgctggagaatcacgccgacgttcgcgtgctgccctcggtgtgggtcgccggcgatccgctgcacaagcttgtcggcaagcgcaagccgatcctcaccgcgaaacggatgctgtcgaaccagaccttccgcgacgtgttcaaggccgacaatctcaccggcgaccagcggctgaagatcaccgcgctgactttcctgttcaccgatctgaagggttcgaccgcactctatgagcgggtcggcgatctcgccgcgttcgatctggtgcgcgcgcatttccacgcgctgctcgagatcatcgcttccgagcgcggcgcggtcgtgaagacgatcggcgacgccgtgatggcgaccttcatccggcccgagcatgcattgtcggcaggcttgcggatgcgggccgcgatgaagcagctcaacaccgagcgcggcaaggaggatctgatcgtcaagatcggcatccacgaggggccgtgcctcgcggtgacgctgaacgagcggcaggactatttcggccagaccgtgaacattgcagccagggtgcagagcctgtcgacgtcacaggaaatccatttgacccagccggtgatggaatcggctgaagtcgcaggcatcctcgatcgcgccgcgatcaagccgatccagaaggaagcggcattgcgcggcattgccgacaagctcgtggtgtacgagataccgtagtcatattgcggaaacgtaatgcttgccgaaacgtaatgccgcagcggggacctgcgcggattgcgccggttctgtttccacgccatataggtttcagcttcattcgacagagagagcgatgctcgacggactccgccaattcattgccgatatcgtctcccccgatgcccgggccgaccgcagtttcgatgacggcgactatcgcttggcggcgaccgcgctgctggtgcatgtcgtctcgctggacggcgagccgacgccgaccgagacgcgcaagctgcacagcctgatcgagagccgtttccagctcgatcccggcaccgccgacaagttgatcgcttccgcgatgcgcgtcgaaggcgaggccgtggatctctatcactttaccagcgtgatcatgcgctcggtgaatgaggaggggcggctgcgcatcgtcgagatgatgtgggagctggtctatgccgacggccaggtcagcgagttcgaggacaatgtggtctggcgcgccgccgacctgctcggcatttcctcgcgcgaccgcatcgacctcaagcacagggtcgccgagaagcaggccgagctgccgaagggcccctggggcacggcagacgcggcaatttgacagggtcggctgcgcaagcgggtgcatcgtcgccggcatcacggatgacgaaattttaatttccgccgcgatcgggggcgatccgactgaaaatcggtagtttcgtcccgaaaccagcgcctcagccgctatccacaagcccatacacggcttgcgtcgcaccgcatgcctatgctctcgtcgccccgcagggaacctcactagaatttgcagtaagagtttgaaacgtgactgagcgtgtgacgctgataaccggggcatcggcgggcataggcaccgaactggcgcgcgtgtttgcatcaaaggggcaccgcgtggcgctggtggcgcggcgcgccgatcgcctgactgcgctcgccgacgagcttggggccaagggcggcgcggccccgatcgtgatcccctgcgatctccagcagaccgatgcgggcgaccggatcgcgcaggccctgaccgaggccggggtcgaggtcgaatatctcgtcaacaatgccggcttcggcctgttcggcctcgctgtcgagcgtgaccgtgccgaacagctcaacatgatcagcgtcaacatccgtgcgctgaccgacctgacgctgcgcttcgccgaccagctgatccgcaatcgcggcggcatcctcaatctcggctcgatcgcgggattcctgccgggccccggcatggccgtgtactacgccagcaaggcctatgtgctttcattctccgaggcattgcgctgtgagctggcgccgaaaggcgtgcgcgttaccgtggtttgccctggtcccgtgccgtccgaattccaggatcgcgcagggtttgccccgggattcgattccgcgatcctcaacgttgcgcctgatgaggtcgcccgccaggcctatcgcggcctgatggccaacaagcgcgccgtgctgcccggcgccttcatcaaggtcgtgccgttcctgctccggctgtttccgcgttcgttcatcctgtcggcggtcggcggctttcagctccgcaagcgctagccccctgaagcgttccctcggtcgtcgttaaggctgtctctggcccgcgatttgcttcgcgcgtgtgtgcgcaaactcacacgatgttaacgagcacttagctatgatcgcaccttacgtgccgaatccttaagcagaggccaaaccttcaagcagaggcaatgtcgttccggtctgaccaaagccgtgtcgtggtacccttcgcaaaccgaaggccgaccgcggtcacgccggtagatcaggtttcggatcaggctgcgctaaggccggtgctgatcgtgctgcatcaggagacctcgactcccggccggatcggcaacgcgctgcgtgcgctgggctaccccctcgacatccgccgtccgcgcttcggcgatacgctgcccgacacgctcgagatgcatgccggcgcggtgatctgcggcggcccgatgagcgccaacgatcccgacgactatgtccggcgcgagatcgactggatttccgttccgctgcgcgagcagcgtccgttcctcggcatctgcctcggtgcgcaaatgctggcgcggcaactcggcgcgcgcgtcgcgccgcatccgcagggccgtgtcgaggtcggttactacccggtcagtccgacggacgcgggccgcgccctttgcccggactggccggcgcgcgtctatcattggcatggcgagggctttcgactgcccgacggcgcggacctgcttgcgaccggcgatgatttcccggtgcaggcgttccagttcggcaacgccttcggcctgcaattccatcccgatgtgacctacgcgatgatgcatcgctggaccacgcgcggttgcgcgcggctggattcgccgggcgcgcaaccggtccatcagcacttcgccgggcgcgccgtgcatgatgccgccgagcgcgcgtggctgaagcatttcatcgacggctggatcgcgcgcgtgccgcggccgatgctgctgcaggcggcggaatagccgccgcgcggaatttcgcgccgcccttttcattctgatggatgtgctactgtcggctgccgcgcgtggctcgtatcgccgtgcgaattcataacaacaaggccagggagatcgccgtgagctatcagcacatcctctatgaggtcagcgaccggatcgcgaccatcacgctcaatcgcccggaccgcatgaatgcgtggaccgcgatcatggagcgcgacgtgcgccatgcgatggaggcggcggcgaacgatgaccatgttcgcgtcatcatcctgaccggcgcgggccgtggcttctgcgccggcgccgacatggaagcgctgcagggcatcgatcccaacgaggtcaggcgtggcgagagcattccgttcgacatgaaccgccgcgccgactggcagacgcgttacgcctattaccccgccatcaagaagccagtcatcgcgatgctcaacggcgctaccgccggcatcggcctggttcacgcgctgtattgcgatctgcgcttcgccgccgacagcgcggtgttcacgacagccttcgcgcggcgcggcctgatcgccgagcacggcatcagctggatgctgccgcgcatcgtcggccatgccaacgcgctcgatctgttgatgtcggcgcggcgggtgtcggccgcggaggcgctgcgcatcggcctcgtcaaccggctctcttcgccggagaagctgcgcgaggacacctatgcctatgcccgcgacctcgccgatttcgtctcgccgagcgcgatcgcggtgatcaagcgtcaggtctatgacgtgccgttccagaccctcgccgaggctaccatagacgccaaccgcgaaatgcagatcgcgctcaagggcaatgatttccgcgaaggcgtcgcgagcttcgtggagaagcggccgccacggtttacggggacgtgagggggattggggctggcggcgaggcgtcggagaagaggggtttggaccggtccgtcttcgccctttgggcttcgccggacaccacgcttcgtccttcgggctctgcgcggctgcgccacgcgtagcccgaaggcgaagcgtggtggagccaggcgggatcgaaccgccgacctcgtcattgcgaacgacgcgctctcccagctgagctatggccccatcgcgaccgggtgttgctgagtgtcccggccgtcagtcgggcgccatttacagtcccgcccaaggccaagtcaagaacggcgaaacggctgttttcgacctttcctgcccggaacttcccttgtttgcggggggccgaaccgatatttagagcatgatccggacccggcgggccgcgttagcgagaagtacgcagcggttttccgagaagatcctgctcaaacgagaagcgcgctggcggttcaagtccggtttcgttgcgctttacctggtcgtcccacccgcgagcccccatcatatgcgcgctgttctcgacatcgtcatcatcgtcctcgacctttatgtctggctgctgatcgcctcggccatcctgtcctggctggtcgccttcaacgtggtcaacacgcgcaaccaattcgtctcggcggtggccgagttcctctaccggatcactgagccggtgctgcggccgattcgcaatgtgatgccgaatctgggcggtctcgatatctcgccgattatcgtgatcctgatcatcatgttcatccagcgggtgatcgcttattacatctatcccaacgtgatctgatccctggcgatggaccgctgctgatggattgctgatggatccttggcgctattccaccgagggcatcagcatcgcgttgcgcgtgacgccgcgcggtggccgcgacgacatcgacgggatcgaaacgctggccaacggccgttcggtggtgaaagtgcgagtccgtgccatcgccgagggcggtgaggccaaccgggcggtgacggagttattggcgaaggcgctcggcgtgcccaaggccagggtgaagctgctatcgggggcaacctcgcggctgaagcaggtggctgtcgacggtgaccctaaggggcttggcgaaacgctgagaaaattgacggcggcaaagccgaaccaagagacgaaggactgacatgaccgcccgcatcatcgacggaaaagccatcgccgccgagcttcgcgcccgcgtcgccgacgaggtcgcccgcgtcaagcgcgaccatgcgctcacgccggggctcgccgtggtgctggtcggccatgatccggcgagcgaggtctatgtccgcagcaagcacacccagacccaggccgccggcatggcctcgttcgagcacaagctgccggaggatgtgtcgcaggccgatctgctggcgctgatcgcgcggctcaaccgcgatccgctggtgcatggcatcctggtgcagctgccgctgccgaaatcgctgcacaccgagaccgtcatcaatgcgatcgatccggccaaggatgtcgacggcctgcatccgaacaatgccggccggctcgccgggggcctggctgcgctgtcgccctgcaccccgctcggctgcatcatcctgaccaagagcgtgcatgcctcgcttgaaggaatgagcgcgaccgtgatcggccgttccaatctggtcggccgtccgctggtgcaattgctgctgaacgagaacgcgacggtgacgatcgcgcattcgcgctcgcgcgatctgccgaaactctgcgcccaggccgacctggtctatgctgcggtcggtcgtcccgagatggtgcggggcgactggatcaagccgggcgcgaccgtgatcgatgtcggcatcaaccgcattccggtgcccggcggcaagccgaagctggtcggcgacgtcgcattccaggaagcgctcggcgtcgccggcgcgatcacgccggtgccgggcggcgtcggacagatgacggtggcgtgccttcttgtcaacacgctgcgtgccgcctgcgcgatccagggcctgccggcgccggcggtgtgagatagctgggaaatctctccgcagtcattgcgaggagcgaagcgacgaagcaatccaccgtcccacacgtgcggtggcatggattgcttcgcttcgctcgcaatgacggaagagcgcgccgtatcgactacgccgtcacttcttcttcgcccgctcgatgccttcgaggatcagtttgcgggcttcgtcggcgtcgccccagcgcagcaccttcacccacttgcccttctcgagatccttgtagtgctcgaagaagtgctggatctgctgcagcgtgatgtcgggcaggtcgctgtaattgtgcaccttgtcgtagcgctgggtcagcttcgaggacggcaccgcgatgatcttctcgtcgccgccggcctcgtcctccatcagcagcacgccgaccacgcggacgctcatcacggcgcccggcacgatcgcgcgggtgttgacgatcagcacgtcgcagggatcgccgtcgcccgacagcgtgtgcgggatgaagccgtaattgccggggtagcgcatcggcgtgtagaggaagcggtccaccacgagcgtgccggcctccttgtccatctcgtatttgatgggctcgccgccgacggcaacctcgatgatgacgttgacgtcgtggggcggattctttccgatcgatatggcgtcgatacgcatggattgctccgcgtggccttctggaagttgagaacgatgtgattttttggttggcgccgccaggccgcaaaacgacatcaggcccggccgtgggggccgggctggccgtcgcgcgcagcgctcaggctggtttagccttgctgcagctgcgagagaagcgggattttcagttggcccaggcgaaagcgaccttgtcgagcgacttcggcccgaaccgttccgaggagcgcgccaccatccggccgcccagcgcgcggtaaaactcggtcgccggctcgttgtcggagagtgcccagatcaccatgctcttcaggccgctctgcatcaggtcgcggcgggccgcggcgaacaggcgccggccgaagccgaggccttggaattccggccgcagatagagctcgtaaatctcgccttcgaaatgcaggctgcgggcgcggttgcggccgtaattggcatagcctgcgattcggtcgccgaacaccagcacgctgacgcggctgcccttgcggatcgcgctgtcccaccactgcgggccgcggcgattgatcagcttttcgagttcggcgccggggatgattccctgatacgccgagcgccaggcttcgtcatgggtagacgccaccgaggctgcgtctgcagctttggctggccggacctcgattagcgttgtgctcatgcatccaatcaaagcaagtcggagggccgccttcaaggtccatcgttaattatcagttaacctgtgggttttttgcatcagtgtcatgaaaacttgtgtcgaaagaggacacttgccaggcttgagcgatcaattgccgatcctggcctgtgcaaagcgtgaatcgcgcgcacagtatgatggtgccgtcgctcggaaaaagctcattcggggctgattcgccgccaggatctggcgtgcgatccaagcgcgatgtgggtactccgagtgcgcagccgcagtggatttttgcgcgcgcacggtctatggcagcggcgatatctgtgcgcgccaaaaccagcccgatcgtgagcggactgcgatgacgctctacttcctgatcaagtatctgcatgtgctcggcgccatcgtgatcctcggcaccgggaccggcatcgccttcttcatgctggcggcgcatcgcacgcaaagcgcgtcctttatcgcgcgcacggcgtcgacggtcgtggtcgcggacatgatcttcaccttgagcgcggtgttgctgcagccggtgagcggcgggctgctgatgttgctgtcggcaaccagcctgaccgagcgctggctgttgctctcgcttgcgctctacgcactggccggcgtgttctgggttcccgtcatcttcatgcagatggagatgcgcgacctcgcgcaggcggctgccgataaggggcttccgctgccgccgcgctacgctgcgctgtttcgccgctggttcctgttcgggattcccggcttcggctcggtgatgatcatcctctggctgatgatcgcaaaaccattctagaacatgatccgatctcatgagtgacgatgcatcacacaatatcctcgtgcttggcgcgtcgggcctgatcggacgctacctcaccgacgatctgagggcgcgcggctttcacgcgatcgggatcgcgcggcagttcacggctgcacaaaagatgagcgcagccgatctcgagctgccactgatgtcgatggatgtcgctgacctgacgcagctgcttcgcacccacgaggtcaatgtcgtcgtcaactgcctcggcgtactgcaggacggtccgggcagcgacacaagcgcggtgcatcgcgacttcgtggcgcgactgctcgaagcgatccgcgacagccatcgcgccatccgtctggtgcacatttcgattcccggcagcgccgatcaggatcgcaccgccttcagcgccaccaagcgcaaagccgaacggctgatcgcggcatcggggatcgcccatgcgatcctgcgcccgggctttgtgatcgcgccatcggcctatggcggcagcgccatgctgcgcgcgctggcggcgctgccggtggatttgccggccgacgaggcggcgacgccgttccagccggtcgcggtcgaggacatcgccgccaccatcgcatggctcgcgacgcgcgatatcgacgacgaagcggtgcgctcggtgacatgggacctgatgcagaagcagccggtctcgctcggcggcgtcatcgcccaattccgctggtcgttcggcacggcgaagcaattccgtatcgcctcgccatcgttcctgatcgatctcggcgcccgtctcggcgatctcacaaaccgcctcggctggatgccgccgatgcgctccactgcgatcgccgagctgcgccgcggcgtcaccggtgatccctcgccctggatgcacgcgaccggcatcgtgccgaagacgatcgcgcaagcggtcggcggccgacccgcgacgatccaggacaaatggttcgcgcggctgttcctgatcaaggcgctgatcttcgcgagcctggtgctgttctgggtcgcgtccggcttcatcgcccttgtcatctcctatgacgccgccgccggcatattgagcgcgcatcatttcccgcccgctctggtcgggccggtgacggtcgggaccagcctgatggacatgagcatcggtgtattgatcgcgatccgccgtgccgcggcgttcggtctcgttgcgggcatcgtcgcctcgctgggctatatgttcggatcggcgatcctgacgcccgacctctggatcgagccgctcggcgcgctggtgaagaccggacctgcgatcgtgctgatgctggtggcgctcttgatgctggacaatcgatagcgtttgcaagcgaagtgggaccggttcgcgtgaagaatacgcgtcgaaggaaaacaagatgaagagttggcccgacgacgacgtgatcctctacgacggcgtctgcatcttctgctcgcgctgggtccgcttcgtcgtcgcccgcgacacggcgcgccgctttcgtttcacgccgatccagtcggattatggcacccggcttgccaagaccttcggcatcgaccctgaggatcccgacaccaacgccgtggtccatggcggcatcgcctggatgaagtcggatgcggcgctgacggtgctgagccatctccccggctggggctggacgagcgcgctgttcgcggtgccgaagccgctgcgcgacaccgtctacagcctcatcgcccgcaaccgctatcgcatcttcgggaagtacgagacgtgcttcgtgccggacgccgacatgcgggcgagggtgctggagtagtttctgccgtcactgcgaggagcggagcggcgaagcaatccactctatccgttccgcggcgcgatggattgcttcgcttcgctcgcaatgatgatgtggctactttcgagatacgaaagccaacacttcctttgccgcccgctcgcccgagtcccgcgcgccgtgcgcggtcgagaagaagtgcggtgacgtcgcctcgccggcgaagaatagccggccgtcgaccggtgcggcgagtgcggcgcgcttgtcggcgtggccgggcagcgcgtgcgagtaggagccgcgggcgaacgggtcatgcgcccagcgggattcgctgagcggcttcagcttgccgcggaaatcattgccgaggaaggagacgatctcgtcgatgctgtgcgcggcgatggcgccgtcgccggcatcttcgagcgctcgcgcaaagcggccgccgaagaagccctcgatgcagggctggccgaacgggcggatgtgataggtgcccatctcggtgcgcatggtggcgccgcgcagattgccttccttcggcagcgcctcgggctcggcgagcgccagcgtcaccttgtcggcaaggccgagcggcaggccgcgcgcggcgtcgagtttttccggcagcgccggcgagaagcggatcgccgagtcggcgatcaggttggtcggcacggtgacgatcaccttgtccgcctccagcgtgccgcgtgaggtctcgatgcggatgcgcctggcggagtgatcgatcagcctcacctcgcagttcagcgcgacgggcacctgctgaccataggcctcgaccagcgcgccatagccgcgccgcacccgccaattgacgttgctgtcctcataggcgtcgaaatcgagaatcgagagctggtcgagctcgcagccgttcacataggtcgagatcgcatcgatcatcgggttccagcgattgccgggctcgaggtagcgatcggctgagccgtccttgccgccgcgcgcggcctgctcgatgcgttcgtagaattcgtcgagcgccagcatgaacgcgtcgcggtcggcctgcgggaacgccttgccataggcgcgctcgcgccacggcggcaggtccttgttgagctcgaagccgagttgctcggcgatgccgacaaagctgttctggtcggccgaatgcagccagccgcagccgacgtcgaacaccacgtccggtgcggcctggatcgtatgcgcccggccgccgagccgatcgcgtgcttccaggacgatgctggagaggccggtgccctccagcgcatgcgcggcgccgaggcctgcggcgccggcaccgatgatggcaacatcgaccgtggagggaagggaactcatgtcccggctctagcacgttcgccgccgggcctgaagcggcctcacgcatgactgtcatcgcccgcgaaagcgggcgatccagtattccagaggcggttgttattgaaccgataggctgcggcgtactggatgccccggtcaagccggggcatgacagattgctttgcggggccgcttttacgccaccgcttccttggccttttcggcgcgcttgcggtcgttcggatcgagatgcttcttgcgcagccggatcgacttcggcgtcacctcgacgagctcgtcgtcctcgatataggccagcgccttttccagcgtcatccggatcggcggcgtcaggcgcaccgcctcgtccttcgaggtggtgcggatgttggtgagctgcttgcccttcagcacgttgatctcgagatcgttgtcgcgggtgtgctcgccgacgatcatgcccttgtagaccttccagcccggctcgatcatcatcgggccgcggtcttccagcttgaacatcgcgtaggccaccgcttcgccctggtcgttggagatcagcacgccgttgcggcggccctggatctcgcccttgtaggcggcatagccgtggaagatgcggttcatgatcgcggtgccgcgggtgtcggtgagcagttcgccctggtagccgatcaggccgcgggtcggcgcgtagaacaccagccgcaggcggttgccgccggacgggcgcatctcgatcatctcggccttgcgctcgctcatcttctgcacgacgacgccggaatgctcctcgtcgacgtcgatcacgacttcctcgatcggctcttgccagacgccggcttcgtccttttgcagcacgacgcgcgggcgcgacaccgagagctcaaaaccctcgcgccgcatggtctcgatcaggatcgcgagctgcaattcgccgcgacccgaaacttccatcgagtccttgtcggcggcttcgacgacgcgcagcgcgacgttgccttcggcctcacgcagcagacggtcgcggatcatgcggctcgtcaccttgtcgccttcagtgccggcgagcggcgaattgttgacgataaaggacatcgacaccgtcggcgggtcgatcggctgcgcctgcaacggggtgtcgacggacggatcgcagaacgtatcggcgacggtgcccttggtcaggccagcaatcgcgacgatgtcgccggcttcggcttcatcgagcggcgtgcgctcgatgccgcggaacgcgaggatcttgctgatgcggccctgctcgatcagcttgccgtcggcgcccagcaccttgacggcctggttgggcttgatgctgcccgaggagatgcggccggtgatgatgcggccgaggaagttgttggcctcgaggatggtgccgatcatccggaacggaccttgctcgacctgcggcggcgccacgtggcgcacgatcaggtcgaacagcggctgcatgccggcgtccttcggtccatccgggctatccgccatccagccctgcttggccgacccgtacaggatcgggaagtcgagctgctcttcgctggcatcgagcgccgcgaacaggtcgaacacctcgttgatgacttcggtcggtcgtgcgtcgggacggtcgaccttgttgatcacaacgatcggcttcagtccgaccttgagtgccttggagaccacgaacttggtctgcggcaacggaccttcggcggcgtcgaccagcaccagcgcgccatccaccatgttcaggatgcgctcgacctcgccgccgaaatcggcgtggccgggggtatcgacgatgttgatgcggatgtctttccactgcaccgaggcggctttcgccagaatggtgatgccgcgctcgcgctccagatcgttggagtccatggcgcgctccgcaaccttctggttttcgcggaaggtgccggattgctgcagcaggcggtcgacgagggtggtcttgccgtggtcgacgtgggcgatgatggcgacgttgcgaaggttcatggctcttcttctggtcgtgcaatggtcagatgcgcgatctcgccgaaccgatttggccggccgctcgctcacgtggcccaatcggggcccggatcacgctcatacccaagaaatttgacggggacgcatcaccccaaaaaggaagcccggtcagaggaccgggcaccttgcgcgttgcggcgcaatatagtcagaaaacgccaaaaaacaacggtttgttggcggtctgggaagctgatttcgagccgggaacccgggttctaacgggtcagagccctgattcggcatcatttccaggcctgcccggatgatcagcccgagcccgtacagcgatcaatgccgacctctaccgcccggtgatcgcggcgcggatcagcatcacgccggcaaaaccgaccagcaggccgagcaggaccagagaaaggatggaggggtcggggcgcgacgaggtcagggtgccgaccccgaacaggatcgcgcagagcccggggagcagcaggaacaccccgaacagcgccatgaaggcggtcgcgcagccgccgcgtcggggcggcagcgggggaggcagcgagggcggcgatccatccggattgataggcctgctgtcatcgctcatcgcggcacctcctcgccctgccgcgcctcgcgataggtctggccggccaggcttgcgcggatgccgtcgatttttccgtcgcgatagaacaggttgtaggtgtcgaacgggatgatcgcgccgctttcggtgacgaagtggatgcagcttcgcttgacgttgccgacgcagaagttgaagcgatcgaggaactgcacgatggtgacgcggaacacgttctcgtaggtcagcccctccggcacttcgaagctcggcaggcagcacaacaactcgcagacccgctccgaggtgttcagcggccccgacgacagcgagaacaaatcgacgaatttttcccgcagcaccggatatttctccgggctgatcgtgttcggcatcacggcgacgagctgctcctgcgggatcagcgaggtcagcggcagcaccttgtcgccgctgcgcaggccgtaaccgatcgagacgctttcgggattgcacggcagcgggatcatgtccttgtcgccgaacactccggtttcgatcacgcgctggcggatctccgacagcatgatgcggtcggtatctttgttgaaggcctcgttgcggccggcgtcctgcaccggctgcagcgtgacgccgcggacacacttccaggtcagcgcatgacggatgatgtcgccgatttcggcgtcgttgacgccgcgcttgatggtggcgaccagcgtggtcgagacgccgtaacgctcgagattttccagcgcctgctggcggatcttgcgcagatcggcgccgcgcagattgaccagtgcctcgcgcttcagcgaatcgaactgcagatagacctccagcccgcgcttgttcgcggcgagcttcgccacgaaatccggctcgcgcgcgatcctgaggccgttggtgttgatcatgacgtggcggatcgggcgggcgcgcaccgcatccaggatcgcgaagaaatccggatgcagcgtcggctcgccgccggagatctgcaccaggtcgggctcgccctcgctcgccaccagcgcgtccagcattgtctcgatcttggccagcggcgtgaagcttgagcgtgccggcgaggaatccgcaaagcacaccgggcaggtcaggttgcagtgctccgtgatctcgatcagcgccaggcaggagtgctgctcatggtcggggcacagcccgcaatcatagggacagccgaattcggtgtggcgctggaaggcgagcggccggtcgccgggcttgatgaagtccttgcacagccgccaataggcctggtcggtcgagaccagcgtcgactgcacgccgtgctgcttgcagcgtttctcgtaccagacctcgttgcctgagatctggatcttggtcggcaccaatgtcaggcaggtctcacagagcgactgggtctggccccagaagatgtaggggcgggccttacgcagcggcgcgttcatgcttcacactcacattcggcgccgtcgccagcatgacggcggcatagaccatgacaaacagcgacagcaggtggaacagcgagaacgggccgatcagcgtgccgtagggtttgatgaactcccacaggaagcgctgcaggccatagtagaacagcacgaggtagaatccattggtgatcacagcggcgttgcggttcaatacggcccagacgtagaaggccgcgaacgccgccattgccaggctttcatagagctgcacgggatggcgcaggatgccgtcgccgaaatcgtggccccagggcagcgtggtcggcgtgccgtaggtgaaatcctcgagccccgcgaaatagcagccgagccggccgaccgcgatgccgagcgcgagcgggagtgcgaagcgcgccccggtgcgcagcgcaatgccgtgcagccatttgtagagctcgatcgcgatgacgccgccggccagcgcaccctcgaccgagcgggcgatacccgacatgcccgagaaccacaggttcaacgtgccgaagatgtaggcgccgatgccggcgccgaacaccagtgcggcgatgtagggcagctcgaaggattgccgcgggaattgcagcccgggccggcgcgacagccaccacatggcgatcgcggccgcgccccatgctgcgatgtcgaagatcgcgtgaagttcagccccgctcatcaggcgagtgtagcgtgattttcgcggcccgcgatagatgttccccctcgccccgcacttgcggggagaggtcagcttggcatcaattggccgggttgtcctcgctcggatacaccccgcgcagcacttcctcgaagtgatccttcaccgcctcgttgcacatgcaggagcgtagcttgagcttgtcgggatcgcggatcacgatcgcgccgcggcgggtatccagcaccccttcggccttgaagttctggatcacccggctggtgtagctgcggccgacgccgagcaaggtcgagagctgctcatgcgtcagcggcaccacgccattgccattggtgcgttccatcgccgacatgatccatttcgcggcgcgctgctcgatcgaatggatcgcgttgcaggcggtcgactggaaaatctgcgccagcatgcagtcggcatagcgcgcgaagatgttgcgcaccgagatcgaggtcagcttggcggcgtcgagcttgctgatcggcagccgcacgaacggccccccgaacttgacggtgatgcgtgtgtacgccggcaggaagccctggctgacgatgccgccgaccgcgccctcgcggccgaccaggatggtttcgacatcgcgcccgtcctcgttggccaccatgtaggacgcaaggctcggtccgcatgggaaatgcacgatctggacgtcgtcgccgggattgtagagcagctcgccggccgcggcctcgacctccgcaagatgcggcgcgagcagcgcgtagtcggcggcattcagccggcgcaggagattgttgaacggccggtcgctcgtcccggccaaatcggtccgtttggcaatcattggaaaatcctggaaacccaacgccgaccatactgaaaaagttccagcttttatgttcactagtgaacagacgcgacggcgcgcgatgtggtgggtttcatcccgggaacagccggcgtgctttcgggcgccggtcgcgggccatccggccggactgatccggtctctcatccatcatcgaagaattggacaccgcgtcatggaatccgctcccaatgccggcatgcccggcgacgtcctcgtggtcgaggacgacccgatcatctcgctctattttgaggacaccatcctgggcttcggcgcccggacggtgcgcaccgccgcgaacgtcgcccgcgcgcttgagctgattgccgaacgcgcgccggatttcgcgctgctcgacgtcggcctcgtcaggggcgagaagacgttcgtgatcgccgagcggctcgatgccctgaaagtgcctttcgctttcatcacgggctacggcgcggacatcaggctgccggaatcgcttgccgacaagccgcggctggccaagccgtgttcgagcgagacgctcgaggctgcgctgagaaacgaactttgaccgattgccgggattcggcctcgcggtctacgatccgggatgtcggattcggtgacgcacgggcctcgggaagccgtcatggcaatcaggatggcgatcgggatatctgccgctgcgcgcgccgcggcgctctctctcggactgctgcttgcgccggttgcggcgggtcctgccattgctgagccagccgccctcacgagcgagcaatcggccgcgctcaaggcctacgacaatgcgctgaagaatttcgtctcgatcatgcgccagcgccgcgcgcagatcgatgccgggcagtcgctgccgaacctgccgggccaggcgatctatctggcccgtgtcgagatgatgagcacctacaaggatctcaccgatgcgctgccggcgcggatcggaaggcccaacaggctgggaatccctccggcctatttcgatgccgacaatgagccgctgctcgacgagtacaagacgctgttcgacgtcatggaggcgccgcccgccggtgcgcaaagctccgatacgccgttcaaggacgtggtcgacctggcgacagtgatcgcgcgcgccagggggctcgatgccgctgacgccgctgtcgccggccgtatcagccttggcctgttctttgccgagacgaacggcaagcagaatgccggaaatgcgcggtcgaacacctacaagggcagcctgcagaccggcccgtccgaagatcgcaacggccagaagaagtgggccgccatcaaggggtcgatcgcggccctcgatcctgcgctgagccgtcgcgacgacaaggaagaggcccgagccggcaatctcgaccatcggttcaatcactggaccgcggtgcgcgacgcgctcatgaacgcacacgcggacgttttcccgcaggttccggcgatcgcaaaggcgctgcccgatccgatcgatcaaatgaagctcttcgagctgatccagatcattccgaccccgacgcgggccgcgctgaagtcgggcaatctggtcggctaccgaatttccgaccccaggatcatgggatatctgcgcaacaacagcatcttcgcgttcggccgggccgacagggcaagaacatcggcgaccttccgcgaaatcctcgatgcgatgtggctgttcaacgccaagttcgaacaggcgcttgccaggctcaaggagatcaaggcaggcaatccaggctgagtggacgtcagagcggaccgagcaggacccaccgcgggtcgcagaactccttcacggcagaggcgacgccgctggcgatcgcgttgcggcgctcgggcgaacccatcttgagttcctcctcccggttgatgatcgagcccgcctccagcaggacggcaggcatcgcggtctttctcagcacgatcagctcgtcatagctgtagacgccggtgtccttgttcagcagcggatgctggtcgcggcccatgatgggctggctgtattgctcggcatagtgcagcccctgggccttcatttcgccggcaaccagttcggcgaaccgcaggcttgtcttgaagtccggattctcccgggacacgaacacggagtagccgctgaagcggtcgctgaagtggctcttcttgccctcgaattcccagtcctcgagcatcttgttgggcacggagtcgtggtggatcgacagcagcagatccgcgtgcagattgttggcggcggagacccgcctgaacaggctgggtctcgctttgccttcggtgagaagcagcctggttccggtaaagccttcggccttcaaggtctcctcgatctgccgcgcaaggcgtaggttgaagttgaattcggcgacgttgcgcgcgctcatcgcgccttccgattccgcggtatggccgacatcgaggacgacccggaatgtcgcgggatcgcatttgcctgcggtcggcttgagagcggaaggtggcagggcgaccggtcccagcgcggcgagccgcgtgacgcggtgcttggctggcgcgcggtgctttgcgagcttggccggccttgtcgctgtcgcgcgcttgggcggcttggcgtgcttgggtgagctcttgaagaaatccggcagccagccggcctcgctgatgtcggtcggcagcagcgcgagcaccgctatcgcaacaacaagcaggcggcgaggccgaagccccgcgacgatgccaccgagcacgcgaacggattcgcagcgcctcatgctccgcccctccgggcccccagcataacggctctgtcaccggtaccggaagaggcaggtcgcgtccatcccctgtcaatcgcgccgcccttgcctcacgccagggcggcgtccggttccgtcgcagctgcggggcgattacaccggcttcggatcgagcgtgatggcccacagctcggcgtcgacgcgatcgcgcaggctcaccgtcatctgcccgctcttgccgtcgatcttgacgtggccgaagaactgcatgccggccgacggcggcaggttctggttggcttcgcccggcgccttgacgaacttcacctcgggaccaaacgtgttgtcgagctcgttcggcccgaacgtgccggcgtgcagcgggccggagacgaattcccagaacggatcgaactcctggaactgggccttgttcggattgtagtagtgcgcggccgcatagtgcacgtcggcggtcagccacaccgtgttgacgatcccggcggtcttgatgaagcgcaggatgtcggcgatctcgagctcgcggccgcgcgccggtccgtcgccctgcgcaaacgcctccgagcccttcttgttggtcgcatcgtcatagacgatcagcgacagcggcatgtcggaggcgatcaccttccaggtggcgcgcgagttgagcagcgcgcgcttcagccaggccatctggtcgggtccgatgaaataggcatcgggaccgtaggtctcctgcaggttcggaccattcgggccgcgatagctgcgctcgtcgagcatgaagacgtcgagatgcggaccgtagctcagcgtgcgatagacccggccgggctcgacgatgctctcgcgcatcggatacatctcgtggaaggcctttgccgcgcgcgcggcgagcacggtgatgtcgcgctccttgtaggccgccggcagctgcttcgacagcgaccagttgttggtcacctcgtgatcgtcccactgcacgaagatcggcacctcggcattgaaggcgcgcagattgctgtcgaggaaattgtatttgtgcgcggcgcggtactcgtcgagcgtctcggcgaccttggccttctccgggatcgtgatgttcttccagatcttgccgtcggggagcttcacctcggacgggatcacgccgtcggcgtagatggtgtcgccggaatgcagcaggaaatccggattgtgcttcttcatcgcggcgaaggtgatcatgccgccgtcgtcggggttgatgccccagccctggccggcgacgtcgccgccccacacgaaggagacgtcgcggcgatcgctcggcgcggtacggaagcggccgaccacaggctcgccggcaatgtcgatatgggcgaggtcgcggaagcggacccgatagaagatgtcctggccggacggcaggttctccagcagcatctttgccgtgaagtcgctctccggcagcgccgtgatcggcggcagcgcgcgggcgtccttgaacgattccgtggtggcgacctcgaccatcatctgcgacggccggtccgcgcgcgcccacaccacaccgccgtcgatgccgacatcgccggactgcacgccatgggtgatcacggggcgatcggcggcgcgcgacagatacggcatcgcgatcacgccgacgccggccgcagccgtggtggaaagaaagcgtcggcgggtgaggtttcgcgagaaccggatcgtcatgggggcctccttaaggtcacagcgacaatgcgacgcgggcgagcagagaggtaggaaaattccatgacggtgagattacagcgggcgtggtcaggcgcggcgggtgaccgcttttggggatgtgagggagaaattttcccctcgtttggctagttcaagtaggcggcgatgccgcagatgatcagcatcacagcgaacgctgcgagaccgagatagaattctcgcactgagaaaaccttaaaggcatttagccatgatgagggggaaaacaccgttatattgagcctgcgtctcaggcggtcttgcatcaaagcgtaaaagcctagcgccacgcacattgcaacgcccaacgctacaccagtgaaagtgttaagcagcatgccgtctactagaccctgcaaccagcaccagtcacgctttttcgtctgtttgcaccaccggtcgtctccgccgtcattccaggaacgacgctcaagaaccggacgcgagtaaccaagttacgccgtgcccgccgccctgaattgcgtcgcagtccgctgcagattctgcggcatgctcagcagcagcgccttgcggtcggcaaccgcgttgtggaactgctccagcgcgatgttgaatgcggtcagcgtgccttcctcgatcgcgccatgctcgaagcagtccagcgtgtggcgcaggatgtcgtcggcctccgcctgcaactggtcgagctcttcggtcgaatcgctctgccgcgcggtcttcagcatctcgagcaggcgctcgcgctgcgaggtgttggtgttgcgctcgtcctgcttgagatagccggcgaaccacgcgccggccgagcccatcgcggagaacgccatcagactccaccagatgtagtcgctgtagcggtcgaggaaggtcttctcctcgccgtcgacgaaggcggccgcgcccggatgtaccggaatggtggcatccttgtcggtgtcgggggtctcgatcttggcggcgagcgggaagtcgttcttgagcgactgccggatcgcgaacaattgccgggtgaaggctgcgaccgtcgcgtccgacaagcccttccgcgccacgatgtggtgcgagaagctgatcgtcttcacctcatcctcgggccggtcggccgagccgagcgagccggcggggatttcagcggcctcataggccggatggttctgcgcgatcgcctcggacgcatcgatcggaaggaaagtcggctcgccgccgtccttggtcgatgccgtgatcgcatcgatcgtgactttgctgttggccgggccgacggcgagataggcgtcggccttcaggttcttgatggcgtcgaccgcctcattggccgggaattgcacgatctcgaccttcatcgggtcgacgccgtattgcgtcaggatcagcttcagcagattgacattggcgggggtacggccgacgacgccgatcttgcggccggcgagttgcgcgatcttggtgatcttcgcagccttgcggcccttgccctttgcagagggtggaacccacatcaccacgacattcttgcgcagcaccgcgacggcttgtgcgttcttcggcacgtcgaggtcgccgcgaatgatggcgagatcggccttgccgtcggccagcgtctgcgcgctggcgctggcgccgtcggtctgcaccggtcggagtttgacctgggtatgctgctggttgttgaaggcctgcgccagcgcctgcacgaccttgaggtcatcgctgttcgcagggccgaccgcgatcttgagcgtcaccggacgcaccgcgaaataatagccggcgatcagcgcgccgacgatggcgagcgcgcctgcgatcaaaacgaacatcagccggcgcttggcggagcgcaacggcttgggcgatatgctggcggagccgtctgtcatcgatctcgcaaacaatcgtcggggctcaatctcgcaaaactaccaacgcgcacatatcctgcttttgtagcaaattcctgggcccacagatgttacatctccgtcatggttaccagcggcgataggacgcgatttcggccctaatttcggcttggatcccatcccggaggccgcttggcagggcgttttcccgcgaagtggacaccggttcgcgcgagaaaacgcgtcaaacctggaatctagagccccgttccgattcaatcggaacggaaaaggctctaggttaaggtcggcggcaaacgggagtgttaccatggtcgaaaagctgtcagcggaagcaacaaaggccgcgctctgggaactggccggctggaccgagctggccggacgcgaggcgattgcaaagaccttcgtattcaaggacttcaacgaggccttcggcttcatggcgcgcgctgccctggtcgccgagaagaacgaccatcacccggaatggaagaacgtctacaagacggtcgaagtcgtgctggcgacccacgacgtcggcggggtgaccaagcgcgatatcgacctcgccaaggccatgaatgcgatcgcaaggcagctcggggtcaactgaccctgctgctccacaaccttgcggccgccattcgacgtccccagattcgtaagcgttcgccgcaggagtagggaaccttgcgatggcaacgactgaacacagcgtgggatttgagcctgccgaccggctggcgcaggaccgcgagagcgtgcgccgccgcttctgggtcaagttcaagaaagtggtgatccggctgcccttcgccgaggatctgctggccgcctattactgcgcgttcgaccggcagacgccgcgccatgtgcaggcggctctgctcggcgcgatcgcctatttcatcctgccgttcgatttcatcccggacatgttgccggtgctcggcttcaccgacgatgccgcggtgctcgccaccgcgatccgcatggtggcaagccacattacgccggagcaccgcgaagccgcacgcgctgcgctgaagcgcggggtgcctgaaaacgcggaataagctgtggcccggatgaatcgaagcgcaatccgggttctcctcacagtcgaacgagcagtcccggatttcgctacgctccatccgggctgcacgatcccgctcagctgcccggatgcaggatcaccttgcccatcgccttgcggccggcgagcaccttcagcgcttccgcggtctgcgacagcgggaaggtgcggtcgacatgcgaggagatcttcccttccgcagtccactgcacgagcttctcgaggttcttgcggttcttctccggattctgccgcgcccacgcgccccagaacacgccgcggatatcgcagcccttcagcagcgcgaggttgagcgggatcttcggaatgtcgccggcggcaaagccgatcaccaggaagcggccttcccatgcggtcgagcgcagcgcggcttcggcataagagccgccgaccggatcgaacacgatgtcggcgcccttgccgtcggtgagcttgcgcaacccttccttgagatcttccttggcgtagttcagcgtcagctcggcgccgtgctgcttggcgaaggcgagcttctcgtccgacgatgcgcaggcgatcaccttgaggcccatcagcttgccgagctcgcatgccgcaaggccggtgccgccggcggcccctaacaccgcgagcgtttcgcccggcttcgggctggcgcgatcttccagcgcatgcagcgcggtgccgtagatgatgatgattcctgcggcgcggtcgtaatcgagattgtcgggaatcttcacgatcgtattcgccggcagcgcgatcttgtcgcgcgcaccgttgtggccgcatgacgccacgacgcgatcaccgactttgagatcagtgacaccagcgccgacgctctcgatcacaccggcgacttcggcagccggtgagaacgggaacggcggcttgatctggtacttgccctggatcatcaggatgtcgaagaagttcagcgccgccgccttgatcgcgatcacggcttcgccgggacccgccaccggatcgggcacgtccgccagcacgagatcgtcgggttgacagtattgcgagcagaggatggctttcatggacacacctgagtttcggacgcagaaagagctgcaagatcttggactacaagcttcatgccggatttgcggcggagcgacaatacagtgcggagggatcaaactatgtttgaaaaaggcctgctagcgaaaaagcgcatcctgatcaccggcggcggctccggccttggcgccgcgatgggcgcccgctttgccgaactcggcgccgaactgatcatctgcgggcggcgcgaggcgctgctggaggaaaccgcaggcaaattccgcagcgcgttcggcgccagggtctcgaccgcgcgctgcgatattcgcgatggcgccgcggtcgaggcgatgatggaccaggtgtggcaggacgcgccgatcgacgtgctggtcaacaatgctgccgcaacctttattgcgcagagcgaacatttgtcattccgcgccgcggacgcgatcctcgcaccgaccctgcatggaacgatgtactgcacgctcgccgccggccgccgctggatcgaaggcaagcacaagggcgtggtgctctcgatcctgtcgacctcgaccatcaccggccgcgccttcacggtgccgtcgtcgatggccaagaccgcggtgctggcgatgaccaagagcctcgccgtcgagtggggcccgaagggcatccgcaccgtggcgatcgcgccgggtgcattcccgacgccgggtgcgaccggtcaactgcgtcccgaagggcgcggcgagacctggtcgcatcgcaatccgctcggccgtgccggcgagcattcggagcttgctaatctcgcgaccttcctgatctcggatcaggccggctacatcaatggcgagatggtggtgcaggacggcggctcgcatttgcgcagttccggtgccgaggacctgctgcaatggaccgacgcgcagtgggagagccagcgcgcggcgcgcgccaagggttgatgaaggctgatgcgcgatcacaagcgctgagtaagaatggatgcgcgtgcggctgtggccgaggcgcatccaggccgaactgccttcccaaaaaagcgtttcccggttatccatccaagccggcggagggggaatcgccgggccatcttgcagtcacaatgatgggggaaccagttggccgtgcggcagattctgacatcactggcggcttgtgtcctgtgcgggatcatctccctcgcgccgacgcaggctgcgcccaagaaagatgcggccaaggaagcggccaagccggcgccttcggccgccgcggctgcggccggcggtgcggagccgaccttgatcggccaattcggcacctggggcgcgtacaccgcctcgcccaacggcaagaaggtgtgctttgcgctcgccaagccgtcctcgtcgaagaccaatccgccgaaccggccgcgcgatccggcctatgccttcatctccacccgtccggcggagaaggtcgtcaacgaagtctcgatcatgatcggctacaccgtgaagccgggctcggaatcgacgttgcaggtcggcggcggaacctatgcgatgtacacgcagggcgatggcctctggatcaagaatgcggccgaggaggagcggatggtggaagccatgcgcaaatcggccgatctgacggtaaaagccgtctcggcgaagggtaccgagacgatcgacagcttctcgctgaagggcttggcgcaggcgctcgaccggctggggcaggactgccggcgctagggccggctcggaaacgcaaaatcgaggtatttcgtggctttccagcaccggctggaaggcctatttgaggtttcatgaccgacaccgcaaccaccaaggccgggtccggcgccagcgcgctggtcgaaaaagttccgctcgagacctatgtgccgccggccaagccgtcgctgatcgggctgtcgcgcgccgaaatagccgatcgcctgggcgagatcggcgtgcacgccggccagcgcaagatgcgcacccagcagctctggaactggatgtatttccgcggcgccaagagctttgccgagatgaccaacgtctcgaaggacatgcgcgccgagctcgagaagcattttaccgtcgaccgtcccgaggtggtcgccgagcagatctccaatgacggcacgcgcaaatggctgctgcggctgccgagcggcgacaaggtcgagcgggcgcatgaggtcgagtgcgtctacatccccgagaccgatcgcggcacgctgtgcgtttcctcgcaggtcggctgcaccctgaactgctcgttctgccacaccggcacgcagcggctggtgcgcaacctcactgccggcgagatcgtcggccaggtgatggtggcgcgcgaccggctgaacgactgggccgaccgcgaggacggcacgcgccgcgtcaccaacatcgtgatgatggggatgggtgagccgctctacaatttcgacgcggtgcgcgatgcgctgttgatcgtcggcgacaatgaaggcatcggcatttcccgccgccgcatcacgctgtcgacctcgggtgttgtgccgaacatcaagcgcaccggtgatgagatcggcgtgatgctggcgatctcgctgcatgcggtgcgtgacgaattgcgcaacgagctggtgccgctgaaccgcaaatatccgatcaaggagctgttgcaggcctgccgcgattatcccggcgcctcgaatgcacggcgcatcaccttcgaatatgtgatgctcaagggcgtcaacgattcgctcgatgacgccaagctcctggtgaagctgctcaagggcattccggcgaagatcaatctgatcccgttcaatccgtggccgggcacggcctacgaatgctcggactgggagcagatcgaaaagttctccgaatacatcttcaacgccggctattcctcgccggtgcgcaccccgcgcggccgcgacatcctcgccgcctgcggccagctcaagtcggagaccgaaaagctctccgcccgcgagcgccaggcgctgcgcgcgatggcgatgacggattgaaagccgtgagcgacaacgctccccacggcgtcattgcgagcgaagtgaagcaatccatgtccgagcttgctgaaggatggattgcttcgtcgcttcgctcctcgcaatgacggaggagtgctagcatggccttgatcggccgcctgttcgtcgtcgcgttcggtttcctgatggcctgcttcgtggccgggatcatcgtggtcggcgcggtgctgtatcccgagatctccgatttcggcggccagatcgaccagagcgcgatcgacatcgtgctcggcttcggcttcatcttcatctccggctttgcgctgttgccggcgctgatcgtggtgctgatcaccgaagcgttcttcatcaggagcgtgctagcttatgcgatcggcggtgcgatcgtcggcgcagcctgctatctcggcctgatcccgttcgatcccgatacggtgcaattccacggcatcgtgcgccggcacatggagatcatgaccggcgccggcatcgtcgcgggtctggtgtactggctgatcgccggccgcaccgccggcgcctggcgcgagccgccacgccccctgccgccgcccccgccattgccgtcgcaatcgccgcggccgtgaagcttcccatgccctctcgcctcggctaaaccgcgcgccatgaaccggaccggacttttcattgcgctggcgctggcgctcgtcgtcggcatcctgttcgggatttatcccgagctcgacctcaagctggcggcgctgttctacaatgccgcgcagaacaccttccccgtgaagctcgatacggtggcgcagttcgcgcgcgatgcggcgatgtggatcgcatgggcgctggtgctgccggcgatcgtgaccatcgtctggaaattcatccggccggaccggccgatgctgatgtccggccgcgccgcggtgttcctgctcaccacgatgctgctctcggccggcgtgctcaccaacctcaccttcaagaactattggggccggccgcggccggtgttcgtgacgcagttcggcggcgaccttgcattcaagccgtggtgggacccgcgcggcggctgcccgcgcaactgctcgttcttctccggcgagggcgccaccgcgttctggacctacgcgccggcggcgctgacgccgcccgcctggcggccgctggcctttgccggggcgaccgtgttcggcatcgtcaccagcgcccttcgcatggccttcggcggtcatttcttcaccgatgtcgcgatcgccggcctggtgtcgttcttcaccgtctggctgttttatgcgctgatctaccgctgggcggcgactcggttgaccgacgcccaggtcgatgccgcgctgacgcggctcgcgatgcccggctaccgctggatgcagcgctggcgccgcggcggcaaggcggagcccagccagcccgaggcttgatcaggggcctgattaaaggcgtgcccccgcttcggaaatttgttatcgcgacttccagaaacctcatccatttcgaccgattggactgtcccatgagcacgattctgaaaagcctgcccactggcgaaaaagtcggcatcgcgttctcgggcgggctcgacacctcggcggcgctgctctggatgaagctgaagggcgccaaggtgttcgcttacaccgccaatctcggccagcccgacgaggccgattacgatgcgatcccgcgcaaggcgatggatttcggcgccgagaaggcgcgcctggtcgactgccgcacccagctggtccacgaaggcattgccgcgatccaatccggcgcgttccatatctcgaccggcggcatcacctatttcaacaccacgccgcttggccgcgcggtgaccggcaccatgctggtcgcggcgatgcaggaggacggcgtcaacatctggggcgacggttcgaccttcaagggcaacgacatcgagcgcttctatcgctacggcctgctgaccaatccgagcctgcgcatttacaagccctggctcgaccagcagttcatcgacgagctcggcggccgcgccgaaatgtcggccttcatgaccgcgcagggcttcgcctacaagatgagcgcggagaaggcctattcgaccgacagcaatctgctcggcgcgacgcatgaggccaaggatctcgagagcctgtcgagcggcatcaccatcgtcaatccgatcatgggcgtgccgttctggcgcgccgattgtgatgtgaagcccgagaaggtcgtggtgcgcttcgaggaaggccagccggtcgcgctgaacggcaggagttttgccgatccggtcgcgctgttcctggaagccaatgcgatcggcggccgccacggcctcggcatgagcgaccagatcgagaaccgcatcatcgaggccaagagccgcggcatctacgaggcgcccggcatggcgctgctgcacatcgcctatgagcggctggtcaccggcatccacaacgaggatacgatcgagcagtaccgcatcaacggcatgcggctcggccgcttgctctatcagggccgctggttcgattcgcaggccttgatgctgcgcgagaccgcgcagcgctgggtcgcgagcgccgtcaccggcgaggtgacgctcgaactgcgccgcggcaacgactactcgatatcaaacaccgagagcccgaacctgacctatgcgccggagcggctcagcatggagaaggtcgaggacgccgccttcacgccggccgaccgcatcggccagctcacgatgcgcaacctcgacatcgccgacacccgcgccaagctcggcgtctataacaagaccggactgatttcgagcggcgaaggcgcacagattttccagctcaagaacgacaaggattgagctggggctgcccgtcgtcgcacacttgctgtcgtcccggcgaaagccgggacccataaccacaggatcgcgttgttagagcgagctgtggctccagcgttgcgcaacaattgacggtcgtggttatgggtcccggctttcgccgggacgacgcggggagagggctgggcttacttcaccctcagcgcatccagcagcgagccgaacgcccgcgcatagtccgtgccggtcttgccgatgtcgggccccgcggacaccgcgaccgctgcttccgtcaccgcacccagcaacagccgcgccaacggctcgatcggttgtttcgcgatcacgccggcctccatcgcggccgccagcgcgcgcggaaacttgccgccgaaatgtttggcgtcgatctcgcgccagcgctcccagccgagcacggccgggccatcgcgcaggatgatctgcccggtcgggcccttcgcgcacgccgcgaaatagccctgtgtgcccgcggccatcgccgcgagtggatcgttctcggcgcgcgagatgcggtcgagatcggcgacgaggtcgatcgacacctgctcgaacaccgcctcgaacaccgcctccttggtcgcgaagtgatgatagaccgcgccctttgcaacccgcgcgccgcttgcgatgtcgtccatcgtcgcggccgcaaagccgcgctcgccaaagatgcggcgcgccgccttgacgatcgaggctctggtcttctcgcgccgttcggcctgggttgccatcacgcatgtctagcccaggttccgcagcgacgccagttgacttacagactatcagtcggtatttaccgaccaatagtcggtaaatggagagtgccatgccttccctcaagacgctgcaagccttcgcggacacggtcgaagccaacgaccatgtcggcgccatcaggaacttctactccgccgatgcccgcacccaggagaatgacggcgaatggcgcgtcggccgcgaggcgctggcggcgcgcgaggcggcggtgctggccgcggtctccggtgtcaagaccacgcggctcgggccgttgctgctcgacggcgaccattcggcgatctgctggcggtttgaattcacggctaaggacggcaaggtccgcagcatggaggaggtcgcctggcagacctggcgcggcgaggaattggtcgaggagcgcttcttctacgatccgcagcagatggcgcgctgacccgccgcccgccgttgcggcaataggtcccgccgccgcctcattgcggcgtcatccgccaccattagcctccgcccccgacgcgcagtgtacgcaaggggcggagcatcgatcatgatcaagtcagtcgctggcgtggcggtcacgctattgttgtcggctacggccgcgctcgcccagaccatctatccgatcgatcgtgcggatattctcgtcggcgcgaaattcgacttcaaggtcgagcttgccggcgtcgtcgatcaggccaggttgaaggtgacgctgaacggcgcggactatgccgcggtgttcggccagagcggcatcttcaccgcgcgcgaagccggcaaggaccagtcggccttgctgctccgtgatgtctcgctcgacaacgccggcccgatgaccgtcgaagtcagcgacggcacgcagagccgcaccgtgacctggaccgtctacgacagcggaccgcgcaaggcgaagaacgtgatcttgttcatcggcgacgggatgtccccggcacaccgcgtcgccgcgcgaatcctctccaagggaattgcggaaggcaagagccgcggcaagctcgcgatcgacgacatgccgcagatggcgctggtcgcgaccgcgggctcggattcgatcatcaccgattccgcgaatgccgcgagtgcctacgccaccggccacaaggccgcggtcaacgcgctcggcgtctacgccgatcgcacgcccgatccgctcgatgatccccgggtcgagaccatcgcgagcctggccaagcgccgggcgggcctcgccatcggtatcgtcaccaacaccgaagtcgaggatgccacgccggccgcgatgctcgcgcatacccgccgccgcgctgcctatgacgcgatcgtcgcgcaatatttcgacgccaaacccgacgtgctgatgggcggcggctccgcgaacttcctgccgcagtccgcggcgggatcgaaacgcaaggacgatatcgattatctcgcgcgcttccgcgacgccggctatccgcttgcgaccacggcaagcgagctgaatgcgctcgcagccaagccggacacccgcaaactcctcggtctattcgcgaccggcaacatggacggcgcgctcgaccgcaagttcctcaagggcggcggcgtcaaaaaattccccgagcaacccgacctgaccgcgcaggtccaggccgcgctcacaatcctgtcgaagcacgaatccggcttcttcctgatggtcgagtccggcctgatcgacaaatacgcccatctgctcgacatggagcgtgcggtctacgacaccatcatgctcgacaatgcggtgcgattggccaaggactgggccaaggcgcgtggcgacgatacgctgatcctggtcgtggccgaccacaaccatccgaacagcctggtcggcaccatcaacgacgacatggcggccgtgcccaacgtaccgctgcgcgagcgcgtcggcgtctacgagaaggccggctttccgaactacccggcgcccgatgccgagggttatccgtcccgtgtcgatgtctccaggcggctcgcgatcttctcggccagcctgcccgaccattacgagacgttccgtcccaagctcgacgatccgaacgagccgaccgtgaagggcgatgcgcccgacaccttcaaggccaacgacaaatacaaggacgttcccggcgtcgtgctgcgcttcggcaatctgccggcgatgatcggtgccagcgtgcattccggcgaggatgtcatcctcaccgccaccgggccgggcagcgagcgcgtccacggctcgatggacaacaccgaggtgtttcgcgtgatggtcgaggcgctggggctgggcgcggggaaataaattcgccgtcattgcgaggagccacccggtcctggatgacgggcttcgctccgcgcgcaatgacggggagggccaagccatcgttactccgcaaaaacaagaatggccgggattgctcccggccatttggtctcgtgatgtctcgccgtctcagcgcggagcggcggaggcgccggtgagcagcggggtgatgcggcggacggtgacgcgccggttgatgcggctcggtccgtcggtctgctccttcagatattgcgagccgtaaccctgcgaagtcaggttctcggccggcacgccgaactgctgcgtcagcaattcggcggcagactgcgcgcggcggtcggacagcgacagattgtcggtgtcgttgccggttgcgtccgtatggccttcgatcaggaacacctcgcgcggattgcgctggatggcccggttgaggccgtcggcaatcacctgcagcctcgccgcctggtcgggtgggatggtccacgatccagagtcgaagttgatcgtgttgacgtcgatgctcggcatctgcatgcggacattggggctgtagcggatctcgtcgagcgaatagcgtcgctcgatccgctgcaccggcggtgcctccatggtctcgtagatcacgtcgggcgacgcttcctgagcgtcgacgatgtagcgatcatagggaatgttgaccaccggcggcggcacgtcgacatagaagccaccgaccgcacgcggatcgcgataggtgttgtcgatgatgacgatctcgcgcccgccgggatcccggcggattcggcgcagcatctggccatcggacccgaccacggtgatgatctcgctgccgtcgggacgaatcacgatggtccgggtctcgccgccgatcgtctcggtgcggatgtcacgcgcgccgtagcggaagcgatagacgtcgtcgccacgaacataggcctgtccgctcgggtcgcggatgatgacccggtccggctcggtgtagatggtgcggccgtcttcgaccacttcctgccgctggccgcgcagatcggcgatactcccgccgaggatggcgccggccaccacgcccgcaccgaccgcagcgccgatggcgagcggggtgatattgtcatggcgcggcggtggcggcagtggcgctgcaacggcgggcgcagcccggaatgccggcgcaaccgtcggcggggcgtattgcgcctggccgggcggcggcgttgcggctgccgagccggggacgaccgacggtgccggtgcgcccatggcggcgccttgggcgggcgatacgccgggcgcagcacccgggcgtgcctgttgagccggagccggtgccgcaccaggggcacccattgccgctccaggggccgccggcgttccgggcggtgtggctggacgtccctgctggcccggagccggcgtcgcagcgggtggcgtcggagtgggtgtggtcgcgccgggtggggtcgcggcgggcgaggtgcccggtcgcgccggcgcgcctgctgccggaggcgtcgtcgccgaaggcgcgggcgttgccggagaggtggtcgcgggcggcgtgcccggaggttgcttggctccgccgggacgttcgccggcaggacgttcgccagcagggcgttcgccgccgggacgttctccgcggaggcgttcggccggcgccggtgtcgcagctcccggagctggtgttgccgctcccggtgtcggtgtcgcggacggcgtgccggggcgtcccgctggagcggcgcctggcgcgggtgtcggcggcgtatgcgccgcacccggtgcggccggagtggctccaggcactggcgtcggcggcgtgcccggccgctgcggtgctgccgcgggtggcggcgtcggcgtcggatgt

SEQ ID NO: 22 - DNA, 132547 bp, Bradyrhizobium enterica
gccggctgctccggcgccagcggcgccgcctcccgccgcggcgagtgcgccggcagccgcgagccaggactaggcacgggcctgagcgcgatgacggtggcctgagccactgtcattgcatactccctgcgataatcccgatatccactgccgccttgatcgctccctttccaaagcgcgcgccggccgctacatccgccgtatgccgctgcatctcatcaagctcgccgtcggttgcgactcggtcaaggaactcaagggttgggttgccgaacggatggcgaccgccaagaaaaaaggcctgccgctccgccacgtccacatcacgcggatgacgccgaagcgcgaggaggagctcctcgccggcggctcgctgtattgggtgatccgcggcgagatcgccgcgcgcgagaagatcatcgcgatcgagccgttccgcgacaaggacggcatcggacgctgccggctggtgatgcagcccaaggtgatcgcggtctcgccgcggccgatgcggccgttccagggctggcgctacctgactgcggactctgcgccgtcagatctcaccaaatcgagcgcggccagcgtggcctcgatgccggagccgatgcgccgcgagctgcgcgacctcggattgctgtgagctaacggcagttgccgcggatcactgcgtgacgagatgcagccggccccattccgacgccgggatctcgacatagcggccacccccggcattgctgacggcgacgtcgagcagttcgtgatcgatccccatctcgccgagatagcgccggaactggtcggtgaagatcgaggtcaggctttcgcgatgctcggccgagacgttgggcgcgagccggttgtggatcgccatgccgctcagcaccacgtggctgcccgccggcaggctgcgatgcacgccgccggccagcaccagcacgcaggcgagatcacaagccgtgcccgacggcttctccttcgcgtccagcgggccgccgggccgcttgagcgcaaagcattcctcctcgggctttccgttgcaggcttcgacggcggtcgccgcaaccatggtatcgatcccgcgatcgcgcaggatgcggccgaggctggaggcgacgttgaggttggattcgcccttgatgttgatcacgaccggcagcttgcgcccggcttgccggtcgaggatcgccagcaggcgcttgtaggtgtcccattgcacggcgccttcggcggcgatccagtccgagcagcccggtccgcaggcgtccggtgcgccatgcgcgacgtagaagatcatcgcgccgggcgccgaattgacgccgccgaccggtggccgggtctgcgcctgcgccatgccggcggccaatagcgcgatgccgagagcgatgccttgcctgaaatacctgatcattccgaccgcctgtgaaaggcgcgatcatccctgcgtcgcggccgccgcgcaagcgaacggcatcacacttttcgcgatgccttacaccgcgatgttgtcgatcagccgcgtgttgccgagcttggccgccaccagcatccgcatcgggccgtccttgagcgagccgatcggcgccagggtggcggcgtggcgaacctcgagataatcgagcacgaagccggccttggtgatctcggcggcgccggcggccatggcggttgcagtgtcctcgccggcgcgcaggcggcctgccgcttgcttcatcacgcggttgagcgcgggggccgcgcgccgttcttccggcgagaggtacacgttgcgcgaggacatcgcgaggccgtcgcgctcgcgcaccgtcttcgatccgatcaccttgaccccgaggtcgagatccgcggccatctgggtcacgacccggagctgctgaaagtccttctcgccgaagatcgcaacgtcgggccggacctgggtgaacagcttgccgaccacggtggcgacgccaccgaagaaatgcggccggaagcgatcctcgagcccggcggtcgccggtccctccggaacgatcctggtggcgaagccgtccgggtacatcgccttcacctcggggtgccagatcaggtcgacgccctcggcggcgagcttggcgacgtcttccttccaggtgcgcggatacgaaccgaagtcctcggtgggagcgaactgcgtcggattgacgaagatcgagaccacgacccgcttggcgcggcgcttggcgagccgcaccagcgacacatggccgtcatggagcgcacccatggtcgggaccagcgcgacagtcgccttcttggcgcgcagggcgtcgacggcgcgacgaagggcagggacggtacggacgacggtgggatttctcggcatctggtctcgactcgtggggcaatcggggtgggatgtttggcgttcggcaggccgcggagtttaccaagtccgagccgctatcggcaaaccgccgcacatgcattacccgatctcgaacgcgcatggatcgctcgttcgattcatcattaaggacgcctgcaattgatttccgctcgcagtgatgcatttcacttgaccgcagccgcgctcgatttgaagatcattgccggggtttgaatcatgttggtgcaggctagtcagggtcaatccggctccgcacacgtcgttgtgctgggcaacgagaagggtggttcgggcaagtcgaccaccgccctgcatatcgccgtcgcgctcctgaaggccgggcagcgcgtcgccagcatcgatctcgactgccgccagcaaagcttcacccgctacatcggcaatcgccaggcctgggcgcggcgctccgggctcgatctcgaactccccgcgcaccactgcatcaagtacggcgagacgatgcagatcgaggagaacgagaacgccgagttccagcagttcatggaagcggtgagcgcggtggaacgtgcctatgatttcatcgtcatcgacaccccgggctcggacagctacctgatgcggctcgcgcattcgatggccgacacgctggtgacgccgatcaacgacagcttcctcgatttcgacgtgctcggcaccgtcgatccggcgacctatgcggtgatcggcgagagccattacgccgagatggtgcgcgacaccagacgcaagcgccgccagctcgacggcgcctcgaccgactggatcgtggtgcgcaaccggctgtcgatgcttggctcgcgcaacaagcagctggtcgccgacggcctgaagcagctgtcgctgcggctcgggttccgggcggtcgacggctttgccgagcgggtggtctatcgcgagtttttcccgcgcgggctgacggcgctcgacgacatcgacgaggcgacgctcggcacccgcccaaacctcggccacgtcaccgcccgcgaggaggtgatgggcctgctgcgccagctcaagctgccgctcgacgagcgcggccgccgccgcgccgccaaccgggccgaatggttcagccaggtcgacaagccgctggaagtcgacgacatcatcggcagctagcgatcgtcaattcatgggggccgctcccaggctcgctggcgcctggtcaaaataccgaaaacaaccccatgcaaaggagccggtggtggccggcgttcgaccgggctgcttgacacgtcgggcaactcaccggtatttttccaatattccgaaattgtgcacttgagctcgccccaaggccagttcctcccgcctggagcggatgctggtttccagtcgatcggcccgttcaaccgggctttcaaggccgcgaccgatctgacatcgactgaatacaggcggcttgcgctggcgaaggaggcgtctgggacgggcagaccgggtgacagctcaggaatcggccagccggacttaggaatcggccagccgaattctgcagccgccaagcgcgcactgaaattttcgtgcaggttctccgcacgatcggtttgggcggtcgcaaactgcgaagcgaggatcgaatggaacggcgccagttcatatcactgctcggcggagctgcgttggcaccgctcgccaggctgccggcatacgccgacccgtccgacggctgcggcgttccaatcgggcgaaacgacggctggtccaccgcctccttagctgaggacaagctcatcgaccgccgcgcgctgtgcaccatggctgagcggctcgccgcctccagcgatagcaacattcattccgtgctggttgtccgcggcggcaggctggagttcgagcgctacttcaggggacgcgacgaggtaccgagccgcttttacggtccccgcgtcgaagacgtcagcttcgatgccgatacgctgcacaacatcaaatcggcttcaaagagtgtcgcgtcactcgtcatcgggatcgcgatcgatcgcgggctgatacgcagcatcaacgagccgatcttcagcttcttccccgaattgtccgacctgcggtcccctgagaaagaccgcatccagctcgtccacgccctgaccatgtcgatgggattggcgtgggtggaggcgacccctgcgaccggagacgacaatgatgaggcgcgcatgcacagggcgtcagacccgtgccgttacgtgctcggtcttgcgtccgcgggcgagccggggcagcagtttctgtacaacaccggcgcgctgacgctgctgtcggccatcgtccgcaaggccgccggacgtccgctcgatgaatttgcgcgcaccgaattgttcgagcctttggggattacggcgttcgaatggagccgggtcaaaggcgatagcgatgccggtggcgggttgcggctgcgaccgcgcgacatggcaaagatcggccagcttgtcctttcgggcggccgctggaacggtcgccagatcgtcccaaaggcatggatcgagagctccacggcaccgaagctcaaggcctccgactatcagtcgtatggctttctgtggtggcttggccgcgcccgcttcaatggccgcgcgatccagtggatcggcgcgctggggcgtggcggtcagtcgatccgcatcgtcccggagctcgacctcgtcgtcgtggtgaccgcgggatactaccaggactacagcccgcaagcctttcgcgcgcagttcgccgtcttcacggacgtcctgcaagcgattccgcctccggtttgaatcggagacgctaattcggcctcagcaccgtcatcttgaacggcccgctattggtggcggcatgcgcgaccgcgtcgttggcgtggtcgagatcgaaggtggtgacctcgaactgatcgagccgcaacagcccggcgcgggcgaggttgacgaggcccagggtcgccgccggaggatacatccagacgccgtggatgctgatgcattcgcgcatgatccagggatagggcaggtcgagccccggtccgcccaacatgccgacgccgcccatcaggacgacccggccgtaggaacgcaccgtcatgatcgcggcgcggacggtcggcgtcgtcaccgacggcggcatcaggtcgagcacgcagtcgatcgggccgggcgcggcgcgccgcatgcgttcgcgatcgtcgtcctcgttgccaccgagcttcacggtgcgcacgcgcggtccgaacctgtggaccagatcggcgagcactttctcgttgcggccgggagcgaccacgcaggccgcgcccatcgcgagcgcgacggcaacggcggcactgccgaaattgccggtggcgccgttcaccagcacggtctcgcccggctgcaggcgtgcagccaggaatccgccatagggcacgaggcaggtgccgagcgcgcaccatgacggcgcatcggccggatcgatcgcgccgatccgcttggcgttctcggtcggcaccagcgtctgctcggcaaacgtgccgtgacggaagtgtcgctgcaggcgcagtccgccttcgccgcgcgcgctccagccctgcaaggtgatgtccggcgagatgctgtcgtcacgcgcgcggaaggtcggatcgcagtacacccaatcgccggcggcgaggtgggttgcgtcgggcccgatcgcgcgaacccgtccgatggcgccgagacccggaacggccggcaacgcgagcaggtagcggcgctcaccgctgaacacctcgttggtgtaggacagcacgcgtgtcgcgatcacgtcgacgaggacttcgcccgttcccatcaccggtgcggggatctcctggatcgcgagcggagagccgaacgactttagaactgctgctttcatctgatctcatcccttgctgagatcggcatcatcacgcgctccgttgcggccaggaagacctggtattatcctaggatcataagtcctactcaggagcccggtaatggccactgcgcggcaaaccgaacttggcgatttcctgcgatcgcggcgccagaagctgacgcccaagctcaacggtgcccaggccgggcggcggcgccgaacgcccggtctgcgccgcgaggaggtggccgagctcgccggcatcggggtcgactggtacatccgcctcgagcagggccgctccgtcagcccgtccgccaccacgatcgacgcgctggcgcgggcgctgcgcctcagcaaggccgagcacgcccatctgcgggcgcttgcaaaggacggcgaccgccggccatttgcggccgagaccgtgccgtctgcgatccggcgggtcgtcgaaagcctcaaccagccggcctatgtcacgggacggcgatgggacgtgctgacctggaacgctgcggcggaagaggtcttcgcgttcggccgcatgcctggggacgagcgcaatacgctgctcttcgtgttgaccaaccccaagagccggcagctgttcggcgcaggctggcccgaggaggcgcggcgcatcgtgacccagttccgccggacccacgatctctgggccggcgacccggccttcgtcgatctgcaggcgcggcttcgcgcaggctgtccggagttcgacggctggtggggcacccacgacgtcagcgtcagcgtcgccggacgaaaggtgctcaatcaccccaagcgcggccggctgaccttcgaatacgcgaccttccaggctaacgacgatccgggcctgaagctgatcatctacaccgaaatcggctgaaatccgtggttttccggtgatttttgtcacagagcggccaaaaagccggaacaaaggtgccggaatccggtttctcctgagcgtcgacccaaggtacgagcatggctcgaacgcaaccttgggaactcgcgtcagagggttagaggagagtgcgagccggcgggttcgtggtgtgcatctgcacaaagtataggtgcgacgcacaacgttatgccacggaagccacaatatttggacttcctgtcacggcgctgtgacatatattctcaaaaggaggccgaagagcctccggccaaaatcgccctgtaaaaggcgggcacctcgaggacgtcatgaagcgtggaattctcgttctgctttcgctctccgtggtgatcacgggtgcgtatttcaccgcgagcaagtgggcgatccgtcatgaaactctcatgttcaaggatccgactcgcgatgagcggccggtcgcggtcgacgtcgccgtgcgcttcgacaaggagatgcaggccgacgccggcatgatcaagcttccggttgcgatcctcaatcatggcaataccgtcaaattcaccgaatattccttcctcgcgaacgtgttcgccgcgcgcggctatctgaccgtcagcattcagaacgacctgccgtcggacgggccgatggtgaccaaggtcggcgagctctatgtcgggcgcctgccgcagtatcagcgcggcatcaccaacatcaaattcgcgatcgaggagatgaagaagcgtcagccgaacgcggactacagcaagctgacgatggtcggccattccaatggcggcgacatcgcgatgtatttcgccaagcagtatccggacgagatcaagaaggtcgtgacgctggacaatctgcgcgtgccgttcatgaccgacggcaagttcaagatcctgtcgttccgttcgcatgatcagcacttcaagcccgatcccggcgtcgtgcccgacgaggagcagtgcgagaaggccggcatcaccgtcgtgaacaccgacttccagcacaacgacatgcgcgacaccggacccgagaaggccaaggactcgatccaggccatgctcgataaattcctggccgacaccgacagtgccgtcgcgccggtcgacacgcgcaatgcaccgccgaagattttggagccaggcccggtctcgctctacgtgccggttgagaagccgccccagaccttcggcgagaagctcaagaagtcgctctcgctgaccgagaccaagaaggttccgtcggccaccaactgaccgagccgcccggaatcgcatccgggcaggctgctcgtcgcgttgaccaatccgataccgcggcccacatagtgtttgctgtacgaggcaagcgctgatggctggcaagacgatcaaaccgacatccggaagtgacgtacgcccggtcgatgcgcctgacgtaccgacgtcgagcgcgaacgacatcgccgcgttcgtggcgaaggcgcgcgcgatgtcgccacatcgcgccggcgcgcgcggcagactggtgtttgcgctcgacgccacgatgagccggcagccgacatgggacatggcgtgcacgctgcaagccgacatgttccgcgaggccgccgcgctcggcagcctcgacatccgcctcgtctattatcgcggcttcaacgagtgccgggccacgggctggatctccgacagcgcgcagctcgcgcggctgatgagcaagatcgactgccagggcggcaatacccagatcggcaaggtgctgtcggagacgcgccgcgaggcggtcgcctcgggcgtgcgcgcgctggtgttcgtgggcgatgcgatggaggagaacgccgatgcgctttgcgcgaaggccggcgaactcggcctgctcaaggtgccggtgttcatgttccaggaaggcagcgatgcagccgccgaacagacgttccgcgagatcgcgcggctgaccggcggggcatggtgcaggttcgatcctggcgcggctgcacagctccgcgaattgctgcgtgccgccgcggcctatgccgccggcggtcgcgaggcgctgttgcagctggcgaagacgacgaacggcgcagccaggctgatcggccagatgaaatagagcgccttggtcaggctccgccggccgtcacggctttcgcgatcgcagcgagcagcgccgacattgctcatgcatgtcgggcggcgccacgcgggcagcttcacgctccggtgagacgaagcttcgcatgctttttgccgccgggccgcctatattccgcgcatgccaaccctgatcgccggcgtcgtcgccgttgtcgtcctttattccgcgctgcagatgtttcgtgcggccaatcccgccgtgctcgcgcgcgcgatcaagatcggcggcggggtgctcgcgctggcggtggcggcctttaccggcgtgcgcggcgaactggcggtggcgatcccgctcggcatcttcggtgccggactgctcggctggtcgccgttcggcaacaccggctttcccaatttcggcggcatgttcggcggttcgcgcagccccggacaaagctcgcgggtgcgctcgcagtatctcgacatgagcctcgatcacggcagcggcgtgctcacgggccagatcgtggccgggccgcaggccggccgcatgctcgacgagttcgacctgtcgcagctgctggcgatggtgccgagctttgacgccgagagcgtcgcgttacttgaaagctatctggaccgccgctttcccgcctggcgtcaggacgcgcagggcgaccgggcaggggggcagggccgcgcggcgccgagcggcaaaatgacgaacgaggaggcctatcagatccttggcctgcagccgggagcgtcgcgtgacgacatcagccgggctcaccgcaccctgatgaagaaactgcatcccgaccaggggggctcgacgtatctcgctgcccgtgtgaacgaggccaaggatactctgcttcgcacgcatctctaactccggctacgccactgacgccacagccgagagctgccttccgcttctgattgatgccccgtctggcccgccgctgtccggcgtggccgatcgttgtttcgggaaaacttaaccgtaaaatcttgacgagaagttttcattgcggcctcgcgcgacaagacccgtcatttgtcgcggcggcccgcaaagcaaaagggccggcgcttgcggcgccggccctttgaaatcgcccgatcgtgtcgatcagttgcgaacggtgatgcaggagatctcggcgcgcttcagcgtcttgcaggccgcctcggcctgatcgcgctcgagcccggcaaagcgggcgcggtagagcttgcgattgtccttggcgacgacctcggtgaacgggtccgccttgctgagcaggccgcgggccgagctgcgtgcgaggtcgatgcgcttgttggcctcgccctcggactccagcgcgccgacctggatgatccagccggaatgcgcggcgcccggcttgaccgcgctggtctgcggcgcggcctggaggctgcgggtcggttcgatcgaggccacggcctgcgcggccggggcggtggcgggggcatgcacggacgacgccggcagcacgccgaggatgccgttgccggtgccgaaattggccggctgcggcggcatctcgggcctcgaggtctcgacggcccgcgccatcatcgcattggaggtctcggggatctcgccacgcgaggggatcgtgctggtgatcggcggcgcggactgcgccgggccggcggcggcgagcttgatctggccggccttgacctggacggtcttcaccttgaccggcttcatcggttcagccgaacccgggatcgccgcgagctgctgggtctggatcacgccggaggtcagcggcgccggttcgggcttggcctgcggctccggctttgcgggggccggcggcagcgcggcggcggctgcggcgatcagcgagggcttgctggccgggcgcggcgccggcaacggggcgggctccgaggcggcgatcggcgcgctgtcggcttcgcgcgcatcgtcggcatcggcgacctggacattggcgtcggccggattgcgctcggtgatcgcggcagcagtccgggtggtagcacccttgccgatgttctccgccagcaggttgcgcatgatggcgtcgcgggagccgccgctgcggccgccgagcacgacgccgaccaggaagcgattgccgcggtggatcgaggtcacgaggttgaagccggaggcgcgggtgtaaccggtcttgatgccgtcgacaccttcgacgctgccgagcaggcgattgtgaccggtgatggtgtggccgcggaaattgaaggccgtcgtcgagaagtagcgataatagcgcgggaagcgatcctggatggcgcggcccagcgtcgactgatcgcgcgccgtcgtgatctgctcgtcattgggcaggccggaggcattgcgataggtggtccggctcatgccgagcgcgcgcgccttgcgggtcatcatccgcgcgaaatcctcttcgctgccgccgatcgcctcggcgatcacgaccgcggcgtcattggcggaccgggtgaccaggcccttgatggcgtcttcgaccttgatggtctggccggggcgcaggccgagcttggtcggatcctgttcggaagcgtgctcggaaaccggcatctcggtgtcgagtttcatctttccggaatcgaggcgctcgaacagcagatagagcgtcatgatcttggtgagcgaggcggggtgccgcaggccgtcgggactgttggatgacagcaccgaaccggtattgccgtcgacgatgatcgacgcgaattgcgggctgtagctctcgcgcgccgactcgctgtggtgatgacgcgcggtgtggcgccggtggcggcgcgcctcggcgctatcactcgtgatcaggatcgccgtcgtgacggttacgagcccaagaacgccaactcgcagcgcccgcgaggaggcaaaggttgttcgaagcatctacttccccgtcccaagttctgttctagatcaccggctcgtggggcgaaattgtgcccggcggccatcgatccttgcctgcgcaacagaccacgtcgggccgaaccatcggccctcgcggcggctcaggtcgctcttctagctaaggtgttgttcacaaacagatttcaaggctgcttgtcggaaggcgaacaaagtccgggaatcaggttaggcggaccgagtttccaaaagattaagcaaccgttgcgtggtcccctgggttttagcgcaaatgcccaggattcgggctgtatgattgtgcgttgcacaatatttgttgactttattgtgcgatgcggtattctaatcaagtcagggggccgggagcttcccggcaatgggaatttgcgccttcaagtctgggaaaaggaattccaatccatggtcaagatcgaagacattcagaactacggcaaagagcatttcgagtcggtcactgcgtcggccaacaacctgcagagcggcgtccaggcgatcgccaccgcctatggcgactacgccaagaagtcgttcgaggacaccaagtcgttcgtcgagaagctgtcgggcgtgaagtcgctggacaaggcgctcgaggcccagaccgagtacctgcgctcgtcctacgagaccttcgttgcggaatcgcagaagatcgccggcctgtacagcgattgcgccaagcaaaccttcaagccgtatgaaggcctggtctccaagttcgcgcccgctcagtaagcgctgccgatcacgtcaaacgaagagcccggccgtttcggccgggcttttttgttgagcgggaggcggggggctatttcgccagccgcagcttgctgagcgccgtgccgatcgtgttgaacgtcgtaacgatctggctggagctggtcagcatgtagaacttgtcgggggtgctggcgcagttcttcaggaccgtcgaggtcggatcggggggcgagctggtgttcacctggatcgtgtagatggtgaacatcggggcgcccttggaatcctttgccgcctgcaggttctggcactgcagggtctgcctcgcgtcgatcggattgcccgacgcctgcgagctgccgtcgccgtagtcgggccagcggtcctcggtgttcaagccgtcggacagcaggatgatgacccggttgtaggtggagttggagtcctcggccggcgtgttgagcggaccgcccaccagcagcgactgccatgcccaggcgagcccgaccgactggtcggtgccgccggtcggctgcatggcgttgaccgcgttcttcaatgaggtccagtcgtagctcagcggaatgatcggctcgagctgcggggaggcgttgttgctgcaataagccgagccgttctcatagtactcgttggccggaaacagcgtggtgacgtcggacgtcgtgggcagcacgccggtcgcatcattgggctgggtgcggtcggtgacgcagccggtccatgtgttgatcgggttggtcgagggctgctgccagttgttcaccacggtcggtgtctgattggtcgcggtccattggttgttggtccatccgacgacggcggtgacacggggctggttcttgttgtcgacgaggtcgttggggcccggctgcgtccaatcgtgggtatacagcttgcccgtgcacgaccgcgaacttccgctgccggtacagccgcagccggagacggcggagccggacgaattggtcgggcaggcgcaggacgacgaccccgagcagaacacgccggtgccgacctgcgtgctcacccagcagccattgtacacggtgtgggaattataatcgacgctcgggcagatatagccggaataggtcccgctcgacggaatgtaggtcgtgttggacgaactggtcgggctcgtggtgcaggtgaagccgccattgttgttggtccaggggcatcgcgcacccggtccgaccgcatgccagttcatcgggagctttgcctgcgtgctgccgttgttgggctgcgtggtcggcggattgagccagtcggtccagtcgatatagttcttgccatagttgctggagccgacgttgacgaccttggcgaacggaatgacggagatatagacgtcgccgttgttcttgctcagcgcgctgagctggtcgatcaggccgcctgatccggccaccgcgttgcgcagcgcgacaatcttgccgttgtcctgcatcgatcccgtgttgtcgagggcgagggcgacgcgcatcttgacgttgccccaggtcgtggtgctcgaggttccgaaattcatggtcgagggatagcccgcggcctgcaggaaggtggtcttgacgtggccggacccgctcaggaggatggttgccgccgcgttcgaggtcggggtcgtgtaggtggccgagaccgcaatgccctggccgtccttgttggtgtagaggccgttgaaataggcctgcgccttgctcgggatctgcgcggccgtgatgttgcccatggtcaggtccttggacagcatcagcgcggtggaatcgagcgccgcctgcatcgaggaccgggcgttgttggcgcgggtatagtcgatcgctacgcctacgaaggcgaggatcggcagtattgcgagggtgaacatcaccgcgacgttgccgttggttgaggttgcataccggcgggcagctgcgcggatgtggttgaatatggctgagccaggcatgacgctctcgtcaaaatggattgcgcggccatctctacgagcgtggttaaacagatggtgaatcgggtaggtgaaacccgtcgggcagcccggcggatggtcaaaagccgggcaaaagcccccaccatcgtcaatggcgcctaaattggatgccccgatcctttgtcaaatcaggcagaaatgattaaccttccggggttggcgcgccgggaatcggaccggtgggctgcggcgggtctgcgcttgcggcaggccgtcgtgagccccatattcgggaggtcgatccggccgccggatcggaccgggagcggcaatctggaaggcattgctgggggttccgcgatcagtctcgcggcaatcgcgtccaccttccagcgccatccggtgtccagccggcctccctttgggaattcgaacgcctgagccatgttgcgatccacgttgacaatcccgatctccgagccggtttcgtccatgccggcggtgcccgccgcgccggtgccgaaaatgaccaatgacgacaaccgcaacggcgcgggcagcggcccgtcgacgtcggtcatcaccaaggtcaagccgaagactaagcgtccgaacctgtatcgcgtcctgatcctgaacgacgactacacgccgatggagttcgtcgttcacgtgctggaacgattcttcaacaaggacgccgaggcggcgaccacgatcatgctgcacgttcaccatcacgggatcggcgagtgcggcgtgtttacctatgagatcgccgagaccaaggtgacgcaggtcatggacttcgcgcgcaagcaccagcatccactgcaatgtgtgatggaaaagaagtagttcgccggaacgattgacccgccgcgggacgcggaacgggtcttgcaccgcattttctgacggacgcgaacggcgttcccgtatgatcacgggacgcggtcgggcggcgtcccgctgcccgaaatttagagggaaaccatcatcgcggggccggtctttcgccacgatccgtcgtaactatatcaatggcgatcacgaaggttgttattgcctgacccggtaatggcgatcatgatggccaggggccatagaggacgcgaatgccaactttttctcaaagccttgaacaatcgctgcatcgtgcattggcgatcgcgaacgagcgtcaccatcagtacgcgacgctcgaacatctgctgctgtcgctgatcgacgactcggacgcggcggcggtgatgcgagcctgcagcgtcgatctcgacaagttgaggacgagcctcgtcaactacctcgagaccgaattcgaaaacctggtgacggacggcgccgatgatgcgaagccgaccgccgggttccagcgcgtgatccagcgcgcggtaattcacgtccagtcgtccggtcgcgaggaagtgactggcgccaacgtgctgatcgcgatcttcgccgagcgcgagagccatgccgcgtatttcctgcaggagcaggacatgacgcgctacgacgcagtgaattacatcagccacgggatcgccaagcggcccggcgtctccgaggcgcggccggtgcgcggcgtcgacgaggaaaccgagaccaagggcaacgaggactcgaagaagaagggcgaggcgctcgagacctattgcgtcaacctcaacaagaaggcgcgcgacggcaagatcgatccggtgatcggccgcaatgccgagatcaaccgtgcgatccaggtgctgtgccgccgccagaaaaacaacccgctgttcgtcggtgaagccggcgtcggtaagaccgcgatcgccgaaggcctcgccaagcgcatcgtcgacagcgacgtgcctgaggtgctggcggccgcgaccgtgttctcgctcgacatgggcacgctgctcgcgggcacccgctaccgtggcgatttcgaggagcggttgaagcaggtcctgaaggagctggaggcgcatcccaacgccatcctgttcatcgacgagattcacaccgtgatcggcgccggcgccacctcgggcggcgccatggatgcatccaatctgctcaagcccgcgctggcttcgggcacgatccgctgcatgggctcgaccacctacaaggaatatcgtcagcacttcgagaaggaccgcgcgctggtgcggcgcttccagaagattgacgtcaacgagccgacggtggaagatgcgattgcgatcctcaagggcctcaagccctatttcgaggattaccatcggctgaaatacaccaatgaggcgatcgaggcggcggtgcagctctcctcgcgctacatccacgaccgcaagctgcccgacaaggcgatcgacgtgatcgacgagtccggcgcggcgcagatgctggtcgccgagagcaagcgcaagaagacgatcggcatcaaggagatcgagaccacgatcgcgaccatggcgcggatcccgccgaagagcgtgtcgaaggacgatgccgaggtgctgaagcatctcgagcagaccctgaagcgcacggtgttcggccaggacaaggcgatcgagtcgctgtcggcgtcgatcaagctggcgcgggccggcctgcgcgagccggagaagccgatcggctgctatctgttctcgggtccgaccggcgtcggcaagaccgaggtggcgaagcaattggcggcgacgctcggcgtcgagctgctgcgcttcgacatgtccgaatacatggagcggcacaccgtgtcgcgcctgatcggcgcacctcccggctatgtcggcttcgaccagggcggcctgctcaccgatggcgtcgaccagcatccgcattgcgtggtgctgctcgacgagatcgagaaggcgcatccggatctgtacaacgtgttgctgcagatcatggaccacggccggctcaccgaccacaacggcaagcaggtcaacttccgcaacgtgatcctgatcatgaccacgaatgcgggcgcggccgatctcgcgcggcaggccttcggcttcacccgctcgaagcgggaaggcgacgaccacgaggcgatcagccgccagttcgcgccggagttccgcaaccggctggatgcgatcgtctccttcgcgcacctcaatgccgacgtgatcggcatggtggtcgagaagttcgtgctgcagctcgaggcgcagcttgccgaccgcgacgtcacgatcgagctgtccgagctcgccaaggcctggctgatcgagcacggctatgacgagcagatgggcgcacgtccgatggcgcgcatcatccaggagcacatcaagaagccgctcgcagatgaagtgctgttcggccagctcaagggtggcgggcacgtccgcgtcgtgctggtcaaggacgaggcgaccgccaaggacaagatcggcttcgaatatgtcgaaggcccggtcacgccgaagcccgagaacctgccgccgcgcaagcgcaagccgccgaagggtggcccgaacaacggcggcggaggcggcaccaaggggccggtctccaagggtccgatggtcaaggcctgaggcgcgagcaagtgatcaacgaaaggccggctcaacagccggcctttttgtttcgttcggcaaatacgacgtgagacgtacaggaagaagtcttcggctaacgtcgaatttccgccaaacattcacccgtcgccaccctgataaaccggcctatcggatcgttatcaatgtcagcttcgatttcgacggcttccgcgggatcgagactctcaagtttttcagcaagactctcgactgatgcccgcaaggcgggcgtccacttcgtcagcccctcatcattcattctcaggcgtatggaataaatgcgcagaagttcgccagccgtcgtttcgggccgtccgcgattggcttgcatttgagctgtgtccagcgagcgtcgttcgatgaggtagggtatctctttttgcttgcggcgtgaaacgaacgatcagaacaccagtccgatcgcatcgcatgcaccacgtcactcgcccttcaaacgctgcccctcttgaacgcgcacccgctcggcgccgcggctgcctgcggaggatagccgcagcatgctcagcatggcgccgaccagcgcgaagccgacgccgaccatcagcgagagccttgtgccgtcagccgggaagcgcgccagtagcagggccacaagggcggcgccgatggtctgtccgagcaggcgggcggtgcccagcatgccgctggcgccgccggagcgctcgcgcggggcggcggcgatcatggtgcggttgttcggggtctggaacaggccgaagccgacgccggcgagcgccatgcgccagatcacgtcgatcggcgtcgcgttggccggcatcaacgctagcgtgcccagtcctgtcgcgaacaccaaaaggccgatgccgccgagcaggccggccggataacgctcgaccagccagccggcaatgggcgcggcaaatgcgacggcgatcggccacggcgtgatcaagaggccgatctgcaccgccgaatatccgaaatggttctccaggtagaacggcatcgcgacgaaggccagcatctggccgcagaacgaggcgatcgaggtgccgatcgacagcgcgaagatcggaatcctcagcagatcgacgggcagcagcggcgagggcagattcagctgccgccggtacagcagatgcgaggcgaccacggcgatggcgaattccagtgcgcacaggtacagcgcctcgccatggccggcgctgtcgatcgcgctgatgccgaagccgaacgcgatcgcgctcatgccggcgctcagccagtcgaacgcgtggaccgcgggccgggtatgcggcaggaagcgccagcccagcgccagcgtcacgatgccgagcggcacgttgatcgcgaacagatagggccaggtgccgaccgcaaggatgaacgaggcgatggtcgggccgaccgcggccgagatcgcgaccaccagcgcattgacgccgatgccgcggccgagcagcgaatgcggatagatgaagcggacgagggcggtgttgacgctgaggattccggcggcgccaaatccttgcaggatgcgggcgatcgtcagcagcggcagcgtatgtgccagcgcgcagaacagcgaggccagcgtgaacaggagcagcccggcgaggtagacccggcgatagccgatgatctcgccgagcgaggcgagcggcagcagcgagatggtgatcgccagctgatagccgttgacgatccagatcgagaacgccgggctggcgttgaggtcccgggcaatggtcggcagcgcgacgttggcgatcgagccgtcgacgacggccatcacgaggccgagcgcgatcgtgagagtggcccaattgcgctgcggctgcggcagcccatcgggatgctcgatgatcgcggacgacatgtcgtgaggttgccttcggttccagcttggcgggcttaccggatgctggattagcctggcctttgcaacccccgaaatgtccgccccggggtgctccgaaacggggccgcggaacaccaaaaaagggctcagccttagctttggccgagcagttccttgatgcgccgctgcagctgccgcttcttgatctcgctgcggcggacccgttcgtcgagatcgctgacataggtgtccgacgtcatgatccggaacgcgaggcccaccttgttggcctgacgccagatcaggcgcgccaggaacgagcggcccttgcgcgcgacactgagattcatctcttcgggcaggtgtgcggcgtcgccaaattcgacgcaggcgccgccttcgctgatgttgcggacgacgcaatccatcgtcgagccgcgttcattgatctccgcaaccgcaccgtaaaacaccttttcacgcgggctctggcgccggtcctgcatgggaaatcctcctaaattaacggcagaactttaccgctgtcgaccagcgaaaagaagggtacgaacggaacccgttgcagttagtgtaaattgtttgcatctgtgaaggcccggattcccggctattttgcgccgcaaacgagccgagaagctagttcggcagccggctgtgccgccactcgcgcggcgacaggccgtaatgctcgcggaacacgcggccgaaatgcgaaaggtcgttaaagccccaggcgaacgcgatctcgctgatgtggcgatgcgcatgtgtcggcgaggcgaggtcgcgcttgcagcgttccagccgctctgccagcacgaagcgctggaacgaggtgtcttcgtcggccagcaggctgttgacgtagcgcggcgagatgccgagcgctgcggcggtttcactgatgccgagctcggggttcggcagatgcgcaagcacatgcgccttcagccggtagagcagggcggagcggtgcgtcgaggccggcagcgcggtgccgccgatgcgctcgctgatcgccatcgcgagcaggtcggcggcctgatcggcgagacggatcgcattgtccggctcgagccggtcggcgatatcagcgagccccgagatgaactgccaggcgagccgctgcaccgggcgatcggacgtgaacgtcgttgccgtcaggccctggctgccggcgaagcgccggtgcagcatcgcgcgcggcacctggaagatggtctgcgtgaagtcgtcattgaagcgcagctcatagggccgggtggtgtcgtagaacgcgaactcgccgggctggatcacggtctcgcggccgtcctgcaccacgccgcccgagccgctgcggccgagcgcgaacagcacgaaatcctcgctggcgcgcgcgatccgcgacggcgtccgcagcacgcgctgccggctcgacgacacgaccgagcacttcgccggaccaagctgcgcgctggtgatggcgccgtggaaggcggagccgaggtcggacttgcagtcgagctgcacgaacacgtcgcagacaatgtcctgccagagcgcgaggcgccgatgcgtgggcgcgccttccgtggtgaacagggccggcatgatttcctcccttcacgagtgcaaacgctggccacgcaaacaaagcaagcttcgtaccggcgaccgctgggggcatctcctccgcagtcgaattttccttccgtcctggtcgaacggcgctcccggtcccggggcagcatgatgtcagaagcggctgcggccgatcaagcacgaaccggccgccagcgtcggccccgaggaggacatcatgggcatcgaacatccgaaatatcgcgttgcggtggtgcaggcggcgccggcctggctcgatctcgacgcctcgattgccaaaagcattgcgttgatcgaggaagccgccgccaagggggcaaagctgatcgcgttccccgaggctttcatccccggctatccctggtacatctggctcgactcgccggcctgggcgatcgggcgcggtttcgtgcagcgctatttcgataattccctgtcctacgacagcccgcaggcggagcagctgcggctcgctgtgaagcaggccggcatgaccgcggtgttcgggctgtccgagcgcgacggcggcagcctctatctcgcgcaatggctgatcgggcctgacggagagacgatcgccaagcggcggaagctgcggccgacccacgccgagcgcaccgtctatggcgagggcgacggcagcgaccttgcggtgcatgaccgccccggcatcggccggctcggcgcgctgtgctgctgggagcatctgcagccgctgtcgaaatacgcgatgtatgcccagaacgagcaggtgcatgtcgcggcctggccgagcttctcgctgtacgatccgttcgcgccggcgctcggctgggaggtcaacaacgcggcctcgcgcgtctatgcggtcgagggctcgtgcttcgtgctggcgccctgcgccactgtctcgcaggccatgatcgacgaaatgtgcgaccgcgacgacaagcacgcgctgctgcatgtcggcggcggacatgccgcgatctatgggcccgacggcagttcgatcgccgagaagctgccgcccgatcaggaagggctgctgctcgccgacatcgatctcggcgcgatcgggatcgccaagaacgccgccgatccggccgggcactattcgcggcccgacgtcacgcgcctgctgctgaacaggaagccctcgaagcgcgtcgagcatttcgcgctgccgctcgacagttttgaggagatcgacgcggctgcgagctgaacgcatcagggcaacatccaacccgaggtgactgccatggaatccgcgattcctcctcatttgcagaccgcgcgctcccgtcatcgccgtgtgcccgacgactacgcgccgccatatccgtccttcgtcgcgcgccacaagcccgcggtcgcaaacgtgatcatggcctatttcggcgtgcagtttcgcggcgagccgacggccgccgcgaccggggcgctggcgcagatcgcagcacgctttgccggcgagaacgggccgacgcattgggaccgcgcccaatatgtcgaccaggccggcttcaccaatgtcgtctcggtcgcctattgggacgatgccggtcgtttcgatgcctggttcgagggcgcccgcgaagcctggaccggcggcgctgccgctgacggcatcggccgcttcatcgaggtgctgcggccgcatgttgcgcactacgagacgctgttctcctcgctcgaccggcctgagggcgtcgcggtgctcgccgacggcatgagcggtgaggtgcaggagcacgcctattggggcggcatgcgcgaccgcatcccgctgtcgcagaccgacccgatgacgcccagcggcgagccgcgcgtcatccgcgacggcgcacgaatccgcgtggtcgcgcatgacaatctctgcctgatccgctccggccaggactggagcgacaccgaggcctccgagcgcaagatgtatctcgacgatgtcgagccggtgctgcgcgagggcatggatttcttgcgcgaccagggcgtgccgatcggctgctacgccaaccgctacatgcgtgtcgtcgatgcggatggacgagtgacggagaagtcctatggccagagctggtggaagagcctcgccgcgctggaacgctgggcggaatcgcatccgacccatgtccggatcttcggcgcggcgatgaagtatctgtcgacgctcgggccgagcgccaagctcaggctgtatcacgaggtcacggtcgccgccgccgacgagcaattcttcgaatatctcggctgccacgatcgcacgggcatgctcggtgcggtgtaggtgaccgcagcacagcccgcctgacgcaaactacggccgcagccggccgccctgcgcggtgatggcctgcgccagttcgatcgccgggccgcgcttggtccggcgctgggtgcggaccacgaattcgacgctgccgagcggcggcaggctcgactccggcatcgcctccaatccgtccgggatgaagccttgggcctgcggcgtgatgccgaggccggcgagcgctgcggcgcgcaggccgctcaagctgccgctggagcagacgatgcgccagggccgtccggaccgttccatcgcctccagcaccacgctgcggctgacgctcggcggcgcgtagaggatcagcggcagcggctgttccggatcgagccgcatcccgggcgcgccggtccacaccaggcggtcctgccacaccaattgtccgagcgcgtcgccgggccggcgcttgcccagcacgaggtcgagctcgccggcatcgaactgctggtacagcacggcgctcaagcccaccgtcagctcgagatcgacttgcggatgacggcggacgaaatcgcgcaacagatccggcaggcgtgagctggcaaaatcctccgcggcgccgaaccggacttttccgcgcacctgcgagcctgcgaagtaatcgcgggcccgtgcgttggcctcgaggatcgggcgcgcgaagcccgtcatcgcctcgccgtcggcggtgagcaccaccgagtgggtgtcgcgcacgaacaggcggcggccggcggcggcctcgagcttgcggatgtgctggctcaccgtcgactgcttcaggccgaggcggcggccggcctcggtgaagttctgcgtctgtacgacggtgaggaaggtctcgagctgggtcgggtcgagcatggcggcgatctcgtcattacataacgtaatgataataacatcggtaagcgcggttcacaatcggtgccggcagagccaccttgcgagcaaggaaaggaacccgccatgaccatcagccgcctgcgatcattcgcgcccgtcgatccctacatcgccgccatcgtcggcatggtcggccttgccacgctgctgccgctgcacgggcagggcaccgtgatcggcggctatgccgccgatgttgcgatcgcgctgttgttctttctgcacggcgcccgcctgtcgaccaccgaggcactggtcggcgcccggcactggaagctgcatctcgtgatcttcctctcgacctttgccctgttcccgctgctcgggctcgcggcgcatgcgctggcgccgcatcttttgacgccggcgctgtgggcgggcgtgatcctgatctgcatcctgccgtcgaccgtgcagtcctcggtcgccttcacctcgatcgcgcatggcaacgtgtcggcagcgctgtgctcggcgaccgcttccaatctgctcggcatcgtcgcgacgccgctgctggcgggcgtgctgctctccagccatggcgggttctccggcaatgccgcgctcgacatcgtcgtgcaattgctgctgccgttcgcggcgggacaattgtcgcggccgctgatcggcggcttcgttgccaggcatcacgcggtgctgggactggtcgaccgcggctcgatcctcctgatcgtctacaccgcgttcagcgacggcgtcagccacggcatctggcaccaggtcgacgcgacgcagatggcgaccgtgctcggcctcgacgcggtgctgctcgcggtcgtgctgctgatcaccaatttcggcagccggctgctcggcttctcgcgtgccgaccgcatcgccatcatgttctgcggctcgaagaagagcctcgcgagcgggttgccgatggcgagcgtgctgctcgccggccaatcggtcgggctgatcgtgctgccgctgatgctgtttcaccagatccagctgatgacctgcgcggcgctcgcgcggcgttatgcgggggctcaagaatccgcctcacacggcgcagtccccgtgctcgtaagggcgcgctgagcgccgcctttccaaggtgtcgtcccccggcttgaccgggggacccagtacgccgcgggttctccgtgactgaccggtgtctctggaatactggatcgcccggtcaagccgggcgatgacacctttggtttggcgagcgatggacgcaacgcccggtgctacgcaacacgcaggcccttggcgatttccttctgcgcgtcgaactcacggcgcaggcgcgccagctcctcggcgctcagcgcgtcggcgttgctgtagtcgcgtttccaggacgcatcctcgctccagcgtagcggcgactgcacggttgtctgcgggccgggcgcagtctccagcacgcgcagcgcgagctccagcgtgacggcctgcgaggcctcgtcatgcggcttgccggccgaattgccgagcgggaaatccgagaacaggaagcgcggcaccgcggcgtgctcgacgatgtccttggcgcagcccatcacgacggtcgggatgccgttggcttcgagatgccgtgccacgaggctgacggtctggtggcagaccgggcagttcggcaccagcaccgcggcgtcgaccttgtcgtcgcggcagcgcttgaggatctcgggcgcatcggtctcgatggtgacgcggtggctgcggttggtcggtgcgccgaagaagcgcggcgcgacttcgccgatcgtgccttccgcggcgaggcgcttgagctgcgccagcgggaaccaggtgccgctgtcggtcgccgtggtgtgggtgcggtcataggcgatgtgcgaaattcgcaaatcgtgtggctgcgaggtgtcgccgtcatagaccgaatagaattttgcgccgccgttgtatttcgcgcccggaccctggtcgccgcgggcaggatcgaacggcgccgcggtcgtgatgatggcgacgcgggactggttcagcggcttcgtcagcggttggaacggcgcggacgtgtaatgcgcccagcggtagggggtggtgtagccgatcgccgcgtaataatcgcgggtccgcttcatgtagccgatcggggcgtcgtcgtcgggggcgaagccgagttgatcgtccgtagctgcggccattttgcgctcccttttgcgcgccatcatttcagtccatagctagaccacgagcctgcggtgtcaagccgcgctgcgcgggaacagatttgcgatgcgaacaggtcgttgcgccgcattggttctgcttttgacgctggtgccgccggtcggtgccggcgcggaggacgcgcctgccgcagccccgccggcgccgccaggcgctgagcaacccgcagcgccgcccgcggacaagccggctgcgcccagcgaaaaacccgcggaggtgccggcccagcaggccgcaccatcggccgagaagcctgcgcccccagcggagacgcctgccgagaagcccgccgcggccacagccgacaagcccgcagacgacgcgcgcgagagcgacacccgcgaggcgatgtgcctgatgatcgagtcggcggcgcgggccaacgacctgccgctcgaattcttcgcgcgcgtgatctggcaggaaagccgcttccaggccgacgcgatcggtccggtcacccgcagcggccagcgcgcgcagggcatcgcgcagttcatgccgggcactgctaacgaacgcgggctgctcgatccgttcaatcccgtccaggcgctgccgaagtccgcggaattcctcagtgagctgcgcaaccagttcggtaatctcggcctcgcggccgccgcctacaatgccggcccgcgccgcgtgcaggattggctcgccggctccggctccatgccgcaggagacgcgcaactacgtctcggcgatcaccggctccagcgtcgacgactgggccgctgctgcccgcaacagcggcaagatgccggagcgtaggccgaccacgagctgccgcgagctgatggcgctgttgaagcgcgcgcccaatccgttcgtggccgggctcgagcagcacattacgctgtcggcagccaaggtctggggcgtgcagctcgccgccggcttcagccgcgacaaggcgctcgcgatgtatgcccgcgcgatgaagcggctgtcgaatgtgatcggagatcaggatccaagcctgctcggctcgcggctgcgcacacgcggcagcgcgacattctatcaggtgcgtatcggcgccgacacacgccccgaggccgacggcctgtgcagccgcatccgcaaggcgggcggggcatgcttcgtgctgaagaaccgggcgtgattgcgcagctccattcgggctactgcatacctgcgctgtgcagccacttgcttgacccgttgagcaccgcgccctaagccgccgccattgcataaccatccggtcccccgtggcgcttcctccgctcgattctccgcaatggcagacctcgttccgcgctttcctgtggggtgcgcggtcggtcggcgcgaccgtgctgacgctggtgctgtttgcgacctatctcggcatcggcgcgctggcgcatgattccggcttctcgctgggctggaccctggcgagcacggcgttcgtctgggcggggcccgcgcagatcatcgtgatcacgacgctcggctccggcgccacggtgctgcaatcggcgatcgcggtcaccgtcagcgcgatccggctgtttccgatggtggtgtcggtgctgccgttgatgcgcaccgaagacaccaaacgccggcatctgatcctggtggcgcatctcactgccgtgacgctgtgggtcgaatgctaccgcttcctgccgcaggtgccgcgcaaccgccggatcgccttcatccatgggctcggcctggggctggtctcggtctgcctgatcgccaacacgatcggctacacactcgccgccaacctgacgccgctgctcgccgccggcatgctgatgctgacgccgctcgccttcctgttctccaccgcgcgcaactgccgcgagctcgccgacgtcatcgcgctggtgctcggtctcttgctgtttccgctggccgcaatgctgaacagcggcgtcgacatcctggtcagcggcgtcgtcgcgggaaccgtcgcctatggggtgcaccgggcgcgggcgggcaccgtgagggcgcgggcatgagcacgttcatcggcgactggcacgcgctcgcgatcctgttcgtggcgggcgtcattcccaaccagatctggcgcatgctcggcctgtggttcggcggcggcatcgacgaaaactccgagctgctggtatgggtgagggcggtcgccaccgcgatcctcgccggtatcatcgcgcagatcgtggtgcagccgccgggcgcgctggccagcgtgccggattggctccgctacggtgccgtcgccgcgggattcgtggcgttcacgctggcgcgaaaatcgatcttcgccggcgtcatcgtcggcgaagtcgtgatgatcgcgggcaaatactggctcggctgattgcggcgaccgcattatccgctactctcgttccccaagaacgagacagcggggaaacggcatgcagcggcgcgcatcatcgccattcattgttgctctgacggcgttgctggtggcggcgctgccggcgcgcgccgcagattatccggcgcgtccgatcaagctcgtggtgccctatgccgcgggcggcccgaccgacgtgctcggccgcatcatcggcgaatatctcgggcgcgatctcaagcaggtcgtcgtggtcgagaacaaggcgggcgcgcagggcgcgatcggtgccgaggccgtggcgcgctccgatcccgacggctacacgctgttcgtgacggcggcttcgatcttcgtgctcaatccgctgctctacaagaagttgccttacgatccggcgaaggatttccgcctgctgtccgtgatcacggatgcgccgatgatcatggaagtgaatccgtcggtgcccgcgaagacgatcgctgagttcgtcgcctacgccaggaagaatcccggcaagctcaatttcggatcggccggcacaggcggcacggttcatctcgccggcgagatgttcaagcagatggccggcgtcgagatgacccatgtgccgtacaagggcgccggacccgcgctgcaggatttgctgtcaggtaacatccagctgatgttcgacacgctcggcaccgcgctgccgccggtcaagtccggcatgctgcgcgcgctcggcgtcagctcgaccgagcgcatcgccgatttgcccgatctgccgacgatcgccgagagcggctatccggattatgcggtcagcgtctggtatggtattgcagcgccgtcgaaagtgcctgacgagatcgccggcaagatcaaggcgagcctcgaccgggccttgaacgacgaggtgttccgcgcttcgctggtcaagatcggtttcccgccgctgcgggcgaagagccaggccgagatcgacaagttcgtggataccgatcgcgcacggtgggcaggcgtggtcaaggcgctcaacatatcgctggactgacacatggtacgtgaaatggaattgcgccagggcgaaatcgccgtcgacatgccggcgccgcgcgatgccgggctcgtcttcatcggccgcatccgcacgccctggacctcgcggctggcgacgccgcggcaggggcggcatgatggcccggtgtgccggctcgagatcttcgagccctgggtcgccgccatcaagggcgtcgatttctacagcaatctcgaagtgctgtactggctgcaccagtcgcgccgcgacatcgtgctgcaaagcccgaagaacaacggcaacacccgcggcaccttctcgctgcgctcgccggtgcggcccaatccgatcggcacttcgatcgtcaagctggtcggcgtcgagggcaacgtcatcctggtccgtggtctcgactgcctcgacgagacgccgctgatcgacgtcaagcccgaccgctgcgagttcacgccgctcgctccgccacaggcgggcgatttcgagacggagtgagccgtcattccggggcatcgcgcagcgatgagcccggaatccattgggccgcaggagcggtcggtggttagttaaatattcgcggaggaatggattccgggctcgcgccaagcggcgcgccccggaatgacgctggtggctacttcaacgccgcgatcagcttcgccgcgttcgcctccagcaccttgccgtcttccttgaggctggcgggcggcagcagcgcgacgccgtccttgcgcggcatcacatgcatgtggaggtggaacacgacctggccgccggcgggctcgttgaattgctgcacggtgatgccgtcggcctcgaacgccttcatcccggcggcggcgatcttgtgggcggcgcgcgcgacatgggcgtaatcatcaggcgtgatgtcgaggatgttgcgggcaggggctttcgggatgacgagcgtatgcccgggtgagcgcggcatgatgtcgaggaaggcgagcacgtgctcgttctcatagaccttgtagcagggaaactcgccgcgcaggatttttgcgaaggggttgttgttgtcgtaggcgggcatggcggcggctcctcaattctatagcgctaatgtctaggtcgcggccgaaacgtcaagcgtcgtcgtcgaccgtcttgcggaatgggcccgcctcggtgagctcgcggccgacctcggcgacataatcgcgctcgcgcttgagatagtcggcgatcgcgcggcgcaacccgggatcggcgatgaaatgcgccgagtgggtggtctgcggcaggtagccgcgcgcgagcttgtgctcgccctgtgcgccggcctccaccaccttgagcccgcgctgaaccgcgaaatcgatggcctggtagtagcagacctcgaaatgcaggaacgggtggtgctcgatcgccccccagttgcggccgaacagcgtgtccgagccgatgaagttgatggcgcccgcgatccagcggccgttgcgcttggccatgaccagcagcacgtcgcgggccatgctctcgccgatcagcgagaagaattcgcgggtcagatacggccggccccatttgcgcgagccggtctccatgtagaactcgaagaaagcgtcccaggcgtcctcggtgatatcggagccggtcagccagtggatggtaatgccggcagcaagcgcctcgcggcgctcgcgcttgatgcccttgcggtggcgcgagttcagcgagccgaggaaatcgtcgaaggtcttgtagccttgattgtgccagtggaactgctggtcggtcctttgcaggaagccgtgcgcgccgaggaattttgcttcgtcttcgcgggcgaaggtcacgtgcaccgaggaggcctcggtggcgttgcagagcgcccgcaggccccgcgccagcgcggagccgatcatctcgcggtcgacgccatcgcggatcaacagccgcggcccggtcgccggcgtgaagggcacggagacctgcagcttcggatagtagctgccgccggcgcggtgataggcctcggcccagccgcgatcgaacacgtattcgccctgcgagtgcgatttcagatagcagggcacgacgccgacgatccggccatcgagtttcgccaccagatgccgcgggccccagccggtccgcgggcaggccgaattggaggcttccgcagcagcgaaaaaggcatgggaaacgaacgggttatagatcgaacttgcagccgcctggcaatcgcctgcggtggcggacgaggccagcgtgtcgaggttatggatgctgtcggcgtccggcctcggattggcacaggcgtcccactcggcggctggaatgccgccgatatcagccacagcctctagggtgatttcagacgacgtcatcgagaatgaagaccggtgcctcttttgagcatgatctttccggaacagctggctccacttccggatcatgccccgcattccgccatcgccgatgacgaccaactcccgacaacatcgtgcgtcgcagcgacgagttcaaggctaccggcgacatgtcaggttcccggtacaaacccctcgaaaatcatctggtcggcgtagcgcgccgcgcgcgcgcgctgttccgcggtccggacggtccacgccagcaatgggcagccgaacacgttgcgggcgatccaaggcgccggcgccggcagctggttgacccagaaggcaacgaagtgcggctcggttctgaagccgtggcgcagatacagcatgccgtcgcgctgcgccggggtcagcttggtccaggaactgtcgtcataggtgcgctgggcggtgatgccgcgcggcaggttcggcatggtctcgcgtagcgccagcacctggtccggatcaaaggacatgccgacaacagggccggaataggacgacagcacctcggccatccgagctaccagcctgcggtcgccgtcgaaatggctcttcacctcgaccaccagcggaacgcggccggcgaccagcgcgcagagatcgccgagcgtcatcatgtgctcggtggtgcccttgaacctgaccgctttcagctcggccgcggtcttggtgaccaacaggccagaaccttcggtgaggcggccgagcgcatcgtcgtggtgcaccatggcctcgccgtcggcggtgagctggatatcgcactcgatcgcgaaattgcctgataccgcggcgttggccgcggccggcatgttctcgatgatgccgcgtgcggcatcgtgcaggccgcgatgggcgaccggccgtttggtcagccaatcaggtgcgcgcatcgctcaggcgacttcgaacacgccttcgacctcgaccgcggcgtccgcgggcagcgaggcgacgccgacggtggtgcgggcatggcggcccttgtcgccgaaggcggcgaccatcaggtcggaggcgccgttcaggactttcggtccgtcgaagaaatcaggcgcggagttgatgaagccgcccaatcgcaccacgcgcaccaccttgtcgagatcgcccagcgcagccttgacctgggccagcaggttgatcgcgcagccctgcgccgcagcgacgccttgctcgagcgtgacgccggccccaagcttgcccttggcgatcagcttgccttcggcgttgaagcagacctgaccggaaacgaacagcaggtttccgctgcggacgaaggggacatagtttgcgaccggggaggtcggctcgggaagcgtgatgccctgtgacgccagtttctgttcgacggtacccgccatctttttgtcccccaattggattgcacgaagcctgaaacgcggtcagggccgagtttgtttcgattgtttcgcgcatcgtgccgccggttgcaagcgacggtcgcctgagggcgtggcggtcgggacgtgcgcaatcgcacggaaactgccgaaaatgacggcaatttcgtcgccgacattgcgattttgtcagacttgccccagttgcggcgcaataccaccgtcactattgtggcgaatccctgcctccccgaggacaaaccatgaccttgccgttccggaatccgtcgcgtgccctggtgctcacgatcgccgttaccgcaggatccgctctggttcatggggctgccgccgcggcaagcgggccgtttctcgcgcaccaggcgctgtacgatctgagcctggtgaaatcacgcggctccaattcggtcagcgacgcgcgcgggcgcattctctacaatttctccggcagctcctgcgaaggctacacctccgaatttcgtcaggtgtccgagctcgacagcggcgagggcaaggtgacgctatcagacctgcgctccacgtcctgggaggatgcggcaggcaagagctatcggttcaagatcgacacgcggatgaacgacagtgaatcctcgccggtcgacggcatcgccgagcgggtcggcgatcatatcaccgtgaagctgacccagccggtgaagaagacattcaatctcgacggcaagatcgtattcccgaccgaacagatccagcgcatcatcgccgccgcccgcgacggcaaatcggtgctcgaacagaccgtctatgacggctcggacaacggcgagaaggtctacaacacgctgaccgtgatcggccgccccattgcgggcgaccgcgcgccgtcatcgcccgatccgtcgaccgccagcgatgcgatgaagaccatgacgcgctggccggtgacggtgagctattatgacagcgacgcacgcgccaaggacggcgagcagacgccggtctacgcgatgtcgttcgagctctacgaaaacggcgtctcgcgcgcgctggtgctggattacaacgatttcgtgatctccggcgcgctcgacaagttcgacgtcagggattccaagccctgcaagtaaggggccggctgtagccacacattcagtgtcgtcccggcgaaagccgggacccataaccaccgaaggtgcgttttgcgacgctggggccacggcttccctcaacaactgcttcctgtggttatgggtcccggctttcgccgggacgacagcggagcaagagaccactctggccggaaccatcagacccgagtacgcttcccgaaacacgcgtgtcagggaggcacatcatgagcaagcgcgaccatcttcgccccagcggcctgcatcacaatccggcttactcccacgtcgtcgtcgcctcgggcgcgcgcaccatctacatctcgggacaggtgtccacggatgaggagggccggctggtcggcgccggcgatctcgccgcgcagacgacgcaggtgatgcaaaatctcggcactgcgctgaaggccgccggggcgagctattccaacatcgtcaagatcacgacctacgtggtcggctacaagccggaactgcgtccgatcatcggcaaggcgcgctcggcgttcttcgagggcatggagccgccggcctcgacgctggtcggcgtaaccgcgctcgcggctccggaatggctgatcgagatcgaggcgattgcggtggcggattgagggccgtggctccccgtcattgcgggcgcagcgaagcattccatacctccacgcctgcggagcgatggattgcttcgtcgctgcgctcctcgcaatgacggagttcgggtcgcggtcgagcccgaactattccggctttgccggcccatcataggcaatgcccctgatcacggcggcgttgccgaacttcttgcgcagattatccatcgcgcgttcggcgtgtgccgagcgacggtcgagcatgtcggaatcgttggcctgcgcgcccgggcgcaacgcgctaacgccggcgcccatcaggcggaaggcggtgccgtcgatctccctggccagcatctcgcgcgtcaccgcaaagatctttgcggccaattgggtcggggtctggatcgattgcgagcgggtgcgctggcggaagtccgcggtcttcagcttcagcgtgatggtgcagcctgagaggtcgctgctcttcagccgcgccgaggtcttctctgacagcttccagagcagtttttccagggttgcgaaatcgcggatgtcggtctcgaaggtggtctcgctcgagatggtcttggcgccgcgatcgggcaccacgctgcggtcgtcgatgccgcgcgccagccgccaaagcctgcggccttcgccggcgaactgcttcatcagctcgttctcgtcggcgcgttgcaaatcggcgatgacgcggaaaccgcgctgcacgagcttctcctgggtcgcgggaccgacgccgtagatgaagccgaccggtttactggccagcatctcgcgcgcctcgtcctggtcgagcgcggcaaaacccctcggcttgtcgagatcggaggcgatcttggcgaggaacttgttgcaggacagcccgaccgacaccgtgatgccgatctcgcgctcgacctcgcgggcgaatttggcgagcaccttggccgggatcatgccgtggacgcgctgcgtgccggagagatcgaggaacgcttcgtcgatcgacagcggctcgaccagcggcgtcagcgcctgcattgcctggcgcacctcgcggccgacccggacatatttcgccatgtcggggggaatcacggtggcgtcggggcagagttccagcgccttgaacatcggcatcgccgagcggacaccgtaggtgcgggcgatgtagcaggcggccgacaccacgccgcgcttgccgccgccgatgatgacggggcggtcggcgatctcaggattgtcgcgcttctcaacggtggcgtagaacgcgtcgcaatcgatatgcgcgagcgcgagcgcgggcagggtgcgatggcgcaccagccgcggcgagccgcaatggctgcatcgcctgaccttgatatctagatcgccgaggcaatcccggcagaaaccgagggggccgccgggcgctgccgccgccgtcgtcacggcacgtcgcgctcccatctcgggtcacccagcgcctggtgggcggcggcgatgttggtcgggtgcagttcggaggctgcggcgaacgcctgcacggtggcatcgtcgcgcatcacgaaatcgagcacgctcgcaagaaattgaggattggacgccgcgttccgcagcgtctccggaccgattccggactcagccaggaacaggcccagccgctcgggatcgccggcaatgaagcccagcgcctgaatcgcaacgatttcagcgacttcccgcaggttgtgaacaggctttttcaacgcgccggtttgcctttccgttaacttatggtctctattgagaggcccatcatgcccgagtcttccgcgcatgttcaagcaacggaaaccacgctgcggaagttggatgtcgggttaacgggttagagcgattctggcgctagtttgaattcacattttcgacgcgtcccgagcgcggtgcgtgaggtgccgcagccgggcccgtctcctgggtttgggagggacgggatggccaaaaccgtcctgatcgtggaggacaatgagctcaacatgaagctctttcgcgatctgttggaagcgcatggctaccagacttcgggcaccagcaatggcttcgaagcgctcgatctcgtgcgcaagctgcgccccgatctcattttgatggatattcaactgcctcaggtttccggcctcgaggtcacgcgctggatcaaggacgatcccgatctgcgcacgattccggtggtcgcagtcaccgccttcgccatgaagggcgacgaagaacgcatccgcgagggcggctgcgaagcctatttgtccaagccgatctcggtcggcaaattcattgagactgtccgacgctttatcggataggggagttgggttgcgatgtccgcgcgtatcctcgtcgtcgatgacgttccggcgaacgtcaagctgttggaagctcgcctgtcggccgaatatttcgatgtgctgaccgcatccaacgggaccgaggcgctggaaatctgttcgcgcgccgaatgcgacatcatcctgctcgacgtcatgatgccggatatggacggcttcgaggtctgccgccgcttgaagtcgaatccagcgacccatttcattcccgtcgtcatcgtcaccgcgctcgacagtccggctgaccgcgtccgcggcctcgaatccggcgccgatgacttcctgaccaagccggtgtccgacgtcgtgctgattgcgcgcgtgcgctcgctgacgcggctgaagatgatgaccgacgaactgcgcatgcgcgccatcacctcgctcgagatcggcatgcaggcgcccgagcgcagcgcgatcgcggatcgtggcaccggcggccgcatcctcctggtcgacgaccggccgtcgtcttacgagaagctggcgccgatcctttccgccgagcataccgtcgacgtcgaggtcaatccgtctgaagcgctgttccatgcggccgagggcaattacgacctgctgatcgtgtcgctcagcctcgacaattacgacggcctgcggctgtgcagccaggcccgttcgctggagcggacgcggcaggtgccgatcctggcagtgtccgatgccgacaacaacacgcggctgatgcgcgggctcgagatcggcgtcaacgactacctgctgcgcccggtcgacaagaatgaattgctggcacgggcgcgcacccagatccgccgccgccgctacaccgatcatctgcgcgacaacgtgcagaactcgatcgagatggcgatcaccgatgcgctgaccggcctcaacaaccggcgctacatggagagccacctcgcgacgctggcggagcaggcttcggtccgcggcaagccgctggcgctgatgatcctcgacatcgattacttcaaggcgatcaacgacacctacggccacgacgccggcgacgacgtgctgcgcgaatttgccgttcgcatccgcaagtcgatccgcggcatcgatctggcctgccgctatggcggcgaggagttcgtgatcgtgatgccggagaccgatctgcatgtcgccggcatggtcgccgagcggctgcgccgctcgatcgcgggcgagccctttgccgtcgagaagggcggcaagcggatcacggtcacgatctcgatcgggctcaccacgctggagcgcaagggcgagcaggttgccgacgtgctgaagcgcgccgacaccgcgctctatcgcgccaagcacgacggccgcaaccgcgtggtttccgcggcggcctaacggccgcgcttcacaccatccacaacactcgtcgtcataccccgcgaatgcgggatatccagtacgccgcggcctctcgattcaagctgaaccgtctctggaatactgggtcacccgctttcgcttttgcgggtgccgacaggattgtcgtaaacgcagcctgctaacggccgcgcttcaccgcgtcataggccatccgcttgaactcgaacgagaacggatggacgaacgccatctggcgctgtgccatcatgacgccggcgatgcccttcttgggcgaaatccaccattgcgtgccggcgacgccgccccagtagaattcgccggcggcgtcgggatgatcgattggtgagggattgaggatcaggccgccggcaagcccatgcgccttgccgggttgctcgcccatcatcgcgaagcggatccattggccgtccggcaactggttggacatcatcgcagcgatcgtgtccggcttcagcagggtcggtccgcctggcagcaggctgcggatcagcgcgaccatgtcgggcagtgtcgacaccaggccgccgccgccattgagccgtgcgaccgggcgcagataggcgccggggaagggcgcattgtcggtgcgggtgaggcccggcttcatcggctccatcagatcggcgcctgcgtagtacgcgaccaggcgtccctgatcctgctcggggaccacgaagccggtatcgaccatgccgagcggatcgaggatgcgcgccttgatgaatttgtcgaagctctggccgctgaccacctcgacgaggcgcgccaccacgtcgatcgcgagcgagtattcccacgacgtgccaggctgatagatcagcggcaggccggccagcacatcgaccatctcggccagggtcgtgttggggttgtgcacgccgcgctcgttgagcgccttgaagatgacggtgccgggatcgaagaagccgtagctcaagccggcgctgtggctcagcaattggcggatggtgatcgagctccgcgccggctcggtgtcgtcgatcgacgtcgcgcccggccgcagcaccttgcggttaccgaggtgcgggatgtaggtctcgatcggatcgtcgagccggatgcggccgtcttcgaccagcagcagcgccgcgcaggaggtgatcagcttggtgttggagaacacccggaagatgtggtcggtgcgcaacggggtctgcgcttccttgtcggcccagccgacgcaggacacgtcgaccagctcgcgccccaccatcacggcggacgagatgccggacagcagattgttgtcgatgtagcgctgcatggcggcgcgcgccggcgcgaaatcgtagccggtggccgtcaccttcagatcttccatggtcgttccccagttgtgccgcagcttgtctcgcggtcgctgtcaatctcgccggacggaatatccagattgggaatgccgtcgcatgccgtcaccgctaacaaccaaaccggacttgtctacgcaaccggatttatccggtgcgcttgttgtccgtagctgcggaggcgccaagcttgacgccggcgttggccagcagcacgcgggcggcttccctggccgcgcgagccatcgccggatcgtcgcgcaccaggtcctgcgcgatcgagccgtcgaccagcagcgtgagctgggtcgcaagcccctccgcatcggcgacgccgagctgctgcagcagatcgcgaaaccagacccggcggctttccttgaaggcaacggcaatgtcgcggacggtgtggtcctcgtcatcaggtccgagctcggccaccgcgttcacgaacgggcagccgcgaaaatcctttgccgcgaagcgccgctccaatgaatcgaaggttgcaagaatctgctcggccggcggcttgtcggacgggcggggctgcacgaagcggcgttgcagataggcctcgatcagcgcgtccttcgacgggaagtggttgtaaagcgtgcgcttgctgatgccgatctcggccgcgatggtgtcgacgccgatggcgcgaatgccctgcaggtagaacagcttgtcggcggtctcgaggatccgctctttcatggtctgtttgggaggcggggaagccatgcgccggccgtgatcctcttcgcttgacagttcgccccttgtatagcctaagtacacaggtctgtgtaaccaaaacatgcgtgaatcgcaggctgtggcgcgcgtgccgcgccgttatgggagaacaaaaacaatgcccctgctgcaggtcctgcgtcccacgcttcccattctgatcggcgcctccatcatgctcacgctgagcatgggcctgcggcagagcctcggcatcttcatgcagccgctgacgcacgacatcggaattacggtgtcgcatttcacgctggcgctggcggtgcagaacctcgcctggggcttcttgcagccgctcgccggtgcgatgaccgtgcgttacggcttccgcccgatcatggtggtcggtgcgctggcctatatcgcaggccttgtgctgatgacgaccgcgcatggcctcgtcagcatcatgatcggcgccggcgtgctgatcggcatttcgctcgcctgtaccgcgaatgccattgcgatgtcggtcgcggcgcgcgcggtgccggagatggtgcgctccaccgtgctcggtatcgtctctgccgcgggctcgctcggcgcgctgctgtcggcgccgatcggccagatgctcaatgaaggtttcggctggcgcgtcgggctcgccggcttcgtcatcctgtcggtcgggatgatccctgcggcgttgtatgccggccgcgtcgacaacatcccgctgccgaagcccgcgggtgacgacatcggcaatgcgacggcggcgaccgcggcaaagaccgcgttcggcaacgcgtcgttcgtggtgatgacctgcgcctacatggtctgcggcatgcagctcgtcttcctcaccacgcatctgccgtcatatctcgccatctgcgggctcgatccgatgctgagcgcgcagacgctcggcatgatcggcggcttcaacgtgctgggctcgctgttcttcggctgggccggccagcgctggaacaagctggcgctgctcggcgcgatctacatcctgcgctcgctggcgctcgcctggtacttcatgctgccggcaacgccgggctcgacgctgctgttcggcgccatcatgggcttcctctggatgggtgtcgggccgctggtcgcgggcgcggtggcggagatgttcggcttgcgctggcaggcgatgatccagggccttgccttcatgagccaccaggtcggcagcttcctcggtgcctacggaggaggggtgatctacgactcgctcggctcctacaccatggcctggcgcatcggcgtcgcgctcggacttgccggcggcatcatccagcttgccttcgcgctgatccggccggcgcagccgccgctgctcaaggccatttgagctcccaatcccggcaaaccggcgattgccccatacgagggcggtcgccgacggctgcctgtttttccatcgatcgcttgctgcgagaacgtgcagtggtgcgcgatgccgttctgcgcgcggattgaatttactgcgtcttcaatctgttgctcggcatgcgccggtggcacgaatcttgattgaatatggctagaaatcgtgccggaagccgttgcagggtttccggcctggggatcccatgggaagggctggccgcaatgaggctagtcgccgtcattctccagctatccgcgcaccacggcctttgccgcgccgccgagcaggaggcgcttgtgccttgcgccgggcctgaatgccgctgcgccttcgccgcatcccgccagccgcaccacggcgcttcgagacatcccgataaccgaatgcgcgctgtcttcggcgttcgcgctccgaacgcgccacgcccattccgaacaccagcatttcttgtgatgggaggacgatgatggagtctgcgacatacacgcgcccgaagctcgtgagaatcgtgattgccctgctgggagtggcgtttctttgcctgctgttcagtgacattgcgctggctgaggatgcggtggcgccgcctgcctgcggcggcaagattctcgagaagtgcacgcccaattcgggcgacaccgcctggatgctgacgtccgtcgcgttggtcctgatgatgacggtgccggggctcggcctgttctatggcggcatggtgcgcaagaagaatgtcggcgacaccgtgatgaccagcttcgccgtcacctgcctggtcacgatcctgtttgccgtcctcacctacagcctcgcgttccgtgccggaacgccgttcatcggtggcctggatcgcatgttcctcaaggacatcctgagcgacatcggcaagggcggcatcggcaatcccaatccgctcgccgcgaccattcctgagtccgtctacatctgcttccagatgacgttcgccatcatcacgccggcgctgatcgccggcgcgtttgccgagcggatgaagttctcggcgatgctctggttcatcgggctgtgggcgatcttcgtctatgcgccgatcgcgcactgggtctgggggcccgacggcatcttctccgcgggcaacgacgccgcctatgtcaaggttctcgatttcgccggcggcaccgtggtgcacatcaatgccggcgtcgccggcttgatgtgcgcgatcatgctcggcaagcgtgtcgagaccgggccggcgcacaacatggtgctgaccttcatcggcgcctcgctgctgtgggtcggctggttcggcttcaatgccggctccgccgtcacggccggcatgcaggccggcatggccatgctggtgacccagatcgccaccgcggtggcgggcttcacctggatgctggtggaatgggcattgaagggcaagccgaccgtcgtcggcatctgctcgggcgccgtcgcgggcctcgtcgcgatcacgccggcctccgggttcgtcgggccggtcggcgccttcgccatcggcatcgccgccggcgtctgctgctactggggatgcaccggcttgaagcgcatgttcagctacgatgacgcgctggactgtttcggcgtccatgccctcggcggcatcgtcggggcgctgctgaccggcgtgttcgcggtcgagcagtatggtggaacggctggcgttcttgagggaaatcctgggcagttcgtcaatcaatgcatcggcgtcgcgacggttttcgtgtatgatgccgtcgtgagcctgatcatcctgttcgtgatcaatctcttcgtcgggcttcgcgtgagccgggatatcgagcgcgaagggttggatctggcactgcacggcgaggtcgtgcagtagacttggcggcgttccgcgccggccggcaatctctgccggctggcacggatcaaagctgttcgaggtgatccgatgaactggttctattggaacacagcgtggtcgctgttcttcagcctggtctggttcatgaccatcacgcacaatccggatgctgagatcgcggatgcgcatctgccggatgaagcgttcaagggctagctccggtagtagcgccacatcctcaggaacgtccggtggatctcgtcgggcgtccggtcgaacggctccagattgacgcgcaccacgccgcgatggtccatgcgccacggcaggcgcatcagcagccgataggccggccgcttgcgccaatcggccaccagtgcgctgccgagcggcccattgagtgcgatctgcaattcgtggacggtcatcgcgcgctctgcgatctcgacgagatcgatctgcgtgatcgcgcgccagcggatcagcccgaaggcctggatgaagatgccatactggttggcgccgatggtcggacgaccggcctccagcagcgggatgttgtaataggtaaagcccgctgcggccgccgccagcaccagccagtaaagcgcgcccgtgatccacgtcgcggtcataaagaccgcggcgagggcggccgtgacatagaccgggaagtagatgtcctcgcggccgtaggcgaccgagtagccgccgacgttgccttcgtccaagcctgcgatcatgtgagccctgcgcccgggacctgcccgaaagacatgagggacgacgtgaggccacaaagcaaaaacggggccgcgagggccccgtttgaaacgttggaagcagcctatcttacttgatcttggcttccttgaactcgacgtgcttgcgcgcgaccggatcgtacttcttcttgaccagcttgtcggtcatggtgcgcgaattcttcttggcgacgtaatagaagccggtatcggccgtcgacacgagcttgaccttgatggtgaccgctttggccatgtgcaaatcctcgaaaaggaaggggtatcgggagccggccaaatcggcccgcgtttggcccggaaactagccacaaaccgctcaaagtcaaggatttccgggcctaaaccaccccgattccggcccgattaccccgcgaagaactgattttcgggccgcggcaggcccaaattctcgcgcagggtccgcccttcgtactcggtccggaagattccgcgcttctgcagttccggcaccacccggtcgacgaactcgaacaggccctgcggcagataggggaacatgatgttgaaaccgtcgctgccgcggcccaccagccattcctccatctggtcggcgatggtctgcggcgtgccgacgaaggcgagcccgccatagccgccgacgcgctgggcgagctggcgcacggtgagcttgtcgcgcgcggcgacctcgaccaggcgctgcctgccgctcttgctggcgttggtctcggggatcggcggcaactgcccgtcgggatcgaagccggatgcgtcggtgccgaggatcaccgagagcgaggcgatcgcgctgtcgtagtggacgcggctgtcgagcagcgcgcgcttctccttggcttcctcgacgctgtcgccgaccaccacgaaggcgccgggcaggatcttcaggtgctcgggatcgcggccgatcttctccatgcggcccttgatatcggcatagagcttctgtccgtcggcgaggctgccgccgccggtgaacacggcttccgcggtctcggccgcgagctgcctgccgtcatcggaggcgccggcctgcacgatcaccggccagccctgcacgggacgggcgatgttgagcgggccgcgcaccgagagatatttgcccttgtggttgagcacatgcatcttgtcgggatcgacgaacagcccggactcgacgtcgcgcacgaaggcgtcatcggcgaaggaatcccagagaccggtgacgacgtcgtagaactcgcgggcgcgcttgtagcgctcggcgtgctccatgtgatcgtcgaggccgaaattcagcgccgcgtccggattggacgtggtgacgatgttccagccggcgcggccgccggagatgtggtcgagcgaggcgaaccgccgggcgacgtgatagggctcgtcgaaggtggtcgagccggtcgcgatcaggccgatattctcggtcacggcggagagggccgacagcagcgtaaacggctcgaacgaggtcacggtgtggctgcgcttcagcgcgttgatcggcatgttcagcacggccagatggtcggccatgaagaaggcgtcgaacttgccggcctcgagcttgcggatcagcgtcttgatgtggtcgaagttgaaattggcgtcgggccacgccccggggtagcgccaggcgccggtgtggatgctgatcggccgcatgaatgcgccgagcttgagttgacgcttcgccattgccccgttccgttcttgatgtcgttagcggaacagatagggaggcgtttcgcggcgcgccattgggtagattattttgtttttgggggccatctcaacatcgtcattccggggcggagcgaagcgacgagcccggaatccattcttcaacaaacgatgcggcccgatggattccgggctcgcgccaagaggcgcgccccggaatgacgcgaggggatcacgctcccagcacatccttctgcatcttgccgccatagaaatggaagaacggcaccggcgcgtcgtgacggagcgggccggtggcgagacggcggtcgagttcggcgagcacattcttggtcatggcatgcgcatcggccagcggctcggagccgatctcgacccagacgagctcgaccagttcggcatcggcatggaccacgccctcgacacgatgcgcgatggtcgacgcatcggcggtgaagaagcgggtgtcgaagcggcggacacggccgggcggggtgatcgcgcgcgcgatcaggaacaggccggacggatcgggcaacagtcctgcatcggcgaatggcgcccaggggccgtcgagctttgtcttcttctcgaccttgcggccgaggcagagtccggtctcttcgcaggcttcgcggatcgccgcattggcaagcgcacgcgcgcggccgggcgtgatcttcgggctgcccttcaagagattggcttcgagctccggcgtgatcggggcggcgaccggcacgcggttgtcggccttgtcgacgcggccgccggggaaaacgaacttgccgggcatgaacaccaccttgtcgtggcgcttgccgacgagcaccttcggcttggcactggagcgatcgatcaggatcagcgtcgcggcatccttcggccggaaatacgcgtgatgatcggcttccttttcgccctggtggacgacggcggcgggtgcggcagcttcagtcatttcatccctttcatttcttcttatcgcccggtttagctagaccggcgggatgtcgctagggggattctcgtcaaagccatgcatgcgcagggcccattgcaatccgatcacggctcccttcaccggttgcaacagtgccagagatgcgaacagcgtgaacggcagatagatcgcaagttgcagccacaccggcggcgaatagttggtctcgatccacagtgcggtcggtaccacgatatggccgacaatgacgatgacgagataggcgggcaggtcgtcggcacgatgcggcgagaaatccagatcgcagaccgggcagtggccgtcgcatttgagaaacttgcggaacagtttgccatttccgcagcgtggacaatggccgcggaacccgcgcttcatcgcgcgccacacgtcgcgcttctcgggctcggccgcgtcgcgagtccagaccaccgtcggcggtgtcacgtccatgacttcacgtccatgagttcacgtccatgacttgcctcgcttcgatttgcccgacttcggcttcgctggcatgcggtccttcttgctgcgcgtcttccgttccttgtgcgccttcttgccggatcctttaccaggtcccttgccaaatcccgcggcgcggcgctcggctctcttgccgtcgcgttttctatcgcgcggaatagcctggccctcggataatagctcaaagcgcagcgcgcccgccaccggcgctgcctcgaccagccgcacgtcgacgacgtcgccgagccgatacatggtgccgctgcgcgtgccgatcagcgcatggcgggtttcgtcgtagttgaaatactcgctgccgatggtgcggatcgggatcaggccgtcggcgccggtgtcgtcgagcttcacgaacaggccggcgcgcgtcacgccggaaatgcggccctggaacgaggcgccgaccttgtcggcaaggaaatgcgcgatcagccggtcggtggtctcacgctccgccttcatcgcgcggcgttcggtgaccgaaatctgcgcggcgatctcggccagcgtctccacgctctcgtcggccggcagggcgccttcgccgaggccgagcgcgcgagtcagcgcgcgatgcacgatcagatcggcgtagcggcgaatcggtgaggtgaaatgcgcgtagcggcgcaggttcaagccgaaatggccgtagttctcggcggagtactcggcctgcgcctgcgagcgcagcaccacctcgttgaccagcggttcgtaatcttcgcccgagacctgcgccagcacgcggttgaattgcgcggggcgcagcgcaccctgcttggtgaagggcaggtcgagcgtcttcaaaaattcctggaggttgtgcaccttctcctggctcggctcgtcatgcacgcgatagatcagcggcagcgccttcttctcaagcatctcggccgcggcggcgttggcgaggatcatgaactcctcgatcagccggtgcgcgtcgagccgctgcggcacgatcacgcgatcgacggtgccgtccggcttcagcaggatcttgcgttcgggcagatcgagatcgagcggatcgcgctcgttgcgcgcgagcttgaccaactcataggccgcccacagcggcttgaggatcggctcgagcaggggacctgtcgtgtcgtcgggcctgccgtcgatcgcggcctgcgcctgggcataggcaagctttgcggccgagcgcatcagcacgcgatggaacgtatgcgagcgcttgcggccgtcggcgccgatcaccatccgcaccgcgagcgcgccgcgcggctcgcccggcaccagcgagcagaggttgttggagatccgctccggcagcatcggcaccacgcgatcggggaaatacaccgaattgccgcgctggagcgcatcgcggtcgagcgccgagccgggccgcacatagtaggcgacatcggcgatcgcgacatggacgatgaagccgcccttgttgttgggatcggtgtcgacctcggcatgcacggcgtcgtcgtgatccttggcatcgggcggatcgatggtgacgagcggcacgtcgcgccagtcctcgcggccttgcaaggtcgcgggttttgcctcttcggcctctcggagcgcagaaggcgaaaatacctgcgggatgtcgtgggtgttgatcgcgatcaggctgatcgccttctcactggcaatggagccgagccgttccttgacacgggcggaggcgaggccaaagctgcgggtgcggatcaggtcgacgctgatcaggtcgccattctcagcgccgccggtatccggcttggcgatgttgagctcgcggccggcctgcttcttgtcgaccgggatcagccgtccgccgccatccggattgcggcggaagatgccgaggatgcgggtacggccgtgatcgatcaccttgatgacgcggccgcgatagggcgtgccgtcttgctcgtcggtcacctcaacccgcagcagcgcgcggtcgccgacaccggcggtggtgccgggcttcggtcgccgcggcgtctcgatgcggattttcggcgcggtgccgttttcctcggagtcccactcggcgggggtggcgatcaattcgccgtcgctgtcacggccggtgatgtcggcgagaacggtcggcggcagcgccgccggctcgtggatcttgcggccgcgttttgcaactgtgccgtcgtcggcgagctcgcggaggatccgcttcagctcgatgcggtcggcgttcttcaggccgaactcgcgcgcgatctcgcgggtgccgaccttgcctggattggcgcggatgaaggcgacgatggcgtcccggcccggaaagccatggtcgggttttcgtttcacttatcctcgtgccttgccggcgcttttcttcgcgggcgctttcgcaggtgccgatgactttgcaggcgacgtcttggcaccggaagcgaccggcgcgcgcgccttgctggtcgcatccgctttcggttttgccgcggccttcttcgacgcagccttcttggcgggcttggcctcggcgtcgccgtcggtctcttcagacttggctgctttggccttgctgggcttggcaggcttcgccgccttcttggccttcttgccgccgcccttggccgcgcgctcgtcgatcagagcgatcgcttccgcgagagtgacctcgtcgggcgtgcgatcgctcgggatcgtcgcgttgacgccgccggccgcgacataggcgccgtagcgtccgttcttcagtgcaaccgcgccgagcgtcggatgatcgccgagcggcttgccgggatcggcgccgaagcggcggccgctcggtcccttggcgatcttctccgcgatcagcgtcaccgcgcggttcaagccgatatcgaacacctcgtcgccggcctcaaggctggcataggtcttctcgtgcttcacgaacggcccgaaccggccgaggccggcggtgatcggctgcccggtctccggatgcttgccgatctcgcgcggcagcgacagcagcttcagcgccagttcgagatccacgtcggcgggcgaggtgcccttgggaatccccgcgcgcttcggcttctcgccttcggcataatccttctgctcgccgagctggatgtaggggccgaagcggccggccttcaccgtgacgtcgaacccggtgtcgggatcggtgccgagcacgcgatcggcgctctcggcgttgtcggccgccaacggacgggtgtagcggcattccggatagttcgagcagccgacgaaggcgccgaacttgccggccttcaggttgagccggccggtgccgcaggtcgggcattgccggacgtcgccgccatccgcgcgcggcggatagatgtgcgggccgagcatctcgtcgagcgcatcgagcacctcggcaaccctgaggtccttgatgtcgttgaccgcgccgatgaagccgcgccagaagtcctgcagcacctgctgccaggcgatctcattgttggagatgcggtcgagctgctcctcgagatcggcagtgaagtcgtactcgacatagcgcgagaagaagttctccaggaacgcgaccacgacgcggcccttgtcctcgccgtgcagccgcttcttctccagcttgacgtagccgcggtccttcagcacctgcaggatcgaggcgtaggtcgagggacggccgatgccgagctcttccatccgcttcaccaatgatgcttccgagaagcgcggcggcggctcggtgaaatgctgggtgacggcgaggctctggcgcttcacggcttcgccctggctcatcgcgggcaggcggcgcgagtcctcgtcttcctcgtcgtcgcggctctcctggtagagcgcgaggaagccgtcgaacttgatgacctgcccggaggcgcgcagctccagcacgcgggagcctgccttggcctcgatgtcgacagtggtgcgttcgagctcggcggactccatctggctcgcgatggtgcgcttccagatcagctcatagagccgtgcctgatcggcatcgagccggcggccgatggtggccgggcggcgcgacagatcggtcggacggatcgcttcgtgcgcttcctgcgcgttcttggccttggcctgatactggcgcggcgcatccggcacataggcgttgccgtaatcctcgccgatcaccttgcgtgcctgggtgatcgcctcgggcgcgatctgcacgccgtcggttcgcatatatgtgatgagaccggtggtctcgccgccgatgtcgatgccctcatacagccgctgcgcgatgcgcatggtgtgcgccggcgcgaagccgagcttgcggctcgcttcctgctgcaatgtcgaggtggtgaagggcgcctgcgggttgcgccgcgccggcttggcctcgacggtcgcgaccttgaacagcgcggcttcgatcgccttcttgaagtcctcggcttccgccccggagccgatgtcgagccgcgcgatcttcttgccgtcggcgccgaccaggcgcgcctcgaaggcttcgccgcgcggcgtcagcagggtggcgaccagcgaccagtactcccgcggcacgaacttttcgatctcgagctcgcggtcgcagaccagccgcagcgcgaccgactgcacgcggcccgccgagcgggcgccgggcagcttgcgccacagcaccggggagagcgtgaagccgaccagatagtccagcgcgcggcgcgccatgtaggcgtcgaccagcgcgccgtcgatctggcgcggcgccttcatggcctcggagacggcctgcttggtgatggcgttgaacaccacgcgctcgaccttctggtccttcagcgcgcgcttttccttcatcacctccagcacgtgccaggagatcgcttcgccctcccgatcagggtcggttgcgaggatcaggcggtcggcacccttcagcgccttggcgatgtcgttgagccggctcgcggccttggcatcgacctcccagatcatctggaaattggcgtccggatcgacggaaccgttcttggccgggaggtcgcgaacatggccgaacgacgccaggacctcgtaggaggaccccagatatttgttgatcgtcttggccttggccggcgactccacaatgacgatattcatgtcattccaatagcttacgggaaaacttgaaggcgggttccgctagactcgcggcccgcattgtcggggcgaacatgggtgctggggcggtcggtgtcaaatcgccagatattgaagggggtgtccaagctgtggagttcctatctcaaaggttgaaaaatgcgccctagagttgcggccggaaacggcgtatctctttatatatggggtgggaatcggattaggccttttgagcagcacagggggcggccggaagcgcaagccgcccggccggcgacgaccggcgagcgacgacatggctggggagggcggcccggatgacgccctggtcctgatcgcagccgccgcgaccgaactcgccaaactcgcccagcgccaccaattcgaagtcctggaccatctgctcgcgatgacccgcctggaagccgacgagcagttgcgggcgcgcagccggcggaagctgtcctaatgctgcggatcgacggggccgaccttccgcagctctctctatgttcgtcgtcctggcgaaagccaggacccataaccaccgcattcggtgatgggcgtgattgcggccctgccaccccgtcattccggggctcgcgaagcgagagcccggaatccattcgtctacggaacgcgcggccggatggattccgggctcgacgctgcgcgtcgccccggaatgacgaaggagaggatccgcttacacagtcgctgcccgccgcgcgcgtttcgccgcaggccttggcttcagcgtcgtgtccgccgcgctgagcacgcgaccgtcctgcgacaacagcgcaagcttcttcaccggcttgcccttgtcgcgatcgaccatgatggtcgcgatctcgtccggatgctcgtcgaactcctcggtccattgccggagcgcgaccaggatcgggaagatgccgtggcccttcggcgtcagcacatattcctgataggcgctgccgtcggaggcggggaccgtcttcaggatgtcgcgctcgaccagcgtgcgcagccgcgtggcgaggatgttcttggccagcccgaggctcgcctggaattcgccgaagcggcgccggccgaggctggcgtcgcggatgatcaagagcgaccaccagtcgccgaacacgtcgagcgcgcgcgccaccgggcaagagtcgcctgccagactggttctcttcaccacgcgtctccaaaaattaaagccatcacggccttgtgtagttgcaatattaaacctcgtcctctagctaggcaatgaagtttaataatgcaaccaactggaggcggacatgagactggcgaacaagacggcattgatcaccggcggcaacagcggcatcgggcttgcgacagcgaagctgttcatcgccgaaggcgccaaggtcgtcatcaccggacgcaacaaggaaacgcttgcggcggcggccaaggagcttgggccgaacgcgctcgccgtcgtggccgatgccaccgacgtcgcggcgctggaagccgcggtgaagcagggcgccgagaagttcggcaagtatgatgtgctgttcgccaatgccggcattcccggccagacgccggtcggcggcaccacactcgccgcattcgaaaatgtgatccgcaccaatctcaccggcgtgttcttcaccgtgcaggcggtcgcgccctatctcaatgacggcgcgtcgatcatcctcaacggctcggtgatttcggtgctcggcaaccccggctattcggcctatgccgcgagcaaggccggcgtgcgcgcgatggcgcgcgtgatggcgtcagaactgtcgccgcgcaacatccgcgtcaacgtggtggcgccgggcgccgtgcgcacgccgatctggggtgcggcaatcgcaacgcccgaagccgagaaggtgttcgagcagcggatcggcaagaccacgccgctcggccgcatcggcgaacccgatcacatctcgaagaccgtgctgttcctggcatccgacgacgcggcacatgtgcaggggcaggaactcttcatcgatggcggcgcaacggcatcgcccgccggcgcgccgatctatcgcggctagatttgtttctcattgtacggagcggccggtgtgaaacggaccacaccggccgctgtcgtgcgcggctatcatcgcgcgcattgaacctttgacgtgttcccgggactcttgaagaggtcggggattattttcaccacggaatcatttggagtgccgtcatgccgaaagcagttcgtattgcgaccccgatcaaggtttcgtctgcgtccgacaattcagactcgtcagactcggcacagttcgtgacggtcgcgctgttttccggcatcggcctgctgatttcgctcgtcgccgtcatctgcggcatccaaggcgtctggttctgagttccatcaaatgaatggcctgccgccgccaggggcgacggcaggtgcttgaccacatcaggccgcgttcaagctgccggcagcttgcagcgcgcccgcgaccgccttctcgcgatgctcggggccgacctggatgccgtcggcggggatgaactccacattcctgacgccgatgaaaccgaacactccacgcagataggtctcgaggtgctcgagcgcggccatcggcgtgtcggcgccgtaatagccgccgcgcgagatcgcgatgatgacgcgcttgttgccggccagcccctcgacgccggtcgggccgtatttgaaggtcttgcctgcgacgaggatgcggtcgatccaggccttgagctgcgaggggatcgtgaagttgtacatcggcgcaccgatcaccacgatgtcggcggcgaggaactcgtcgagcaccgcctggccggtcgcgatgtcgtcgcgcaccgacggatcaggcgccgcgccctggctggccgcaaggtgcaggccggagaggtgggcgagcggggtctggctgaggtcgcggtagctcacgacgaggccgggattggcctggcgcagccgctcgacggcggcggcggagacctggcggctgacggaatgagggccgaggacggaggaatcgatgtgcagaagtttcatggcaggggtcacctttggtataggtttgtaactggcgctatatgagtgaccgtcttaaatctccgcaagaacgcacatttttgaaacccgagcacaccaatggaacccgagcacatcgatgtaaccgtcgcgaccggtcttccgcgtcaaccagacacgcatcaggactgccgcggcgtggcctcggtgttgtcgcgggtcggcgacaaatggagcgtgctggtcatcatgctgctgcgcgacggaccgcgccgcttcaatgagctgaagcgcatgatcaacggcatctcgcagcggatgctgacgctgaccctgcgcgggctggagcgcgacggcctggtgacgcgcacggtgtttccgaccatcccgccgcgggtcgattacgagctgaccgatctcgggcgcgggctcgcggtgccagtgatggcgctcggcgaatgggcgttcgcgcatctgccggagatcgagggcgcgcggaacgattttgatgcgcgcaatgcggagtgatcaggtcgcaaccgcgactaaatcatcgacaccagcccgccgccgtgacgctccagtttgcctgccaattcaagctccagcagcacggcgcggacgatggcgggcgagacgtcggccatccggatcagatcgtcgaggctgatcgggctcggcccgagcaggttgatgatgcgggcgcgatcaccgccatcagtggcaaaatcgagtggctcgtcgttttcgcgcgcgccgagcatgacgggccgctccatgatcggcgcgaccgcgttgatgacgtcggcagcttcggtcaccagcgtggcaccttgcttgatcaggtcgttggcgccggcagcgcgcggatcgatcggcgagcccggcaccgcgaacacttcgcggccctgttcggccgccatccgcgccgtgatcaacgaacccgaacggtgcgcggcctccaccaccacgacgccgagcgaggcgcccgagatcagccggttgcggcggggaaagtcgcgcgctcgcggcacgtggccgagcggcatctccgagatcgccgcgccgtgttcgagcagggccgccagcagatccgcgtgctccggcggatagatgcggtcgtggccgccggcgagcaccgcgactgtgccgctggcaacggtggtgcgatgcgctgcctggtcgatgccgcgggccaggcccgagatcacgacaaagccggcgtcgccgagatcgcgcgccagggtgcctgcaaatttcagcccggcgccggacgcattgcgggagccgacgatcgcgatcatcggccgcatcattgtggcgcgcgtgccgcgcacgccgagcaacggcggcgcatcgtcgatggtggcaagccgcgccggataatgctcctcttccggtgcgacgaggtcgatgccgaaccggcggcaggccgcgagctcggctgtggcgtcggcctcgctgcagatccgctgcggtcccgatccgccgccgcggcgtgcgaggtccggcaagcgctccagcgcgtgcgcggcgtcgccaaaatggcggagcagcgatgcaaaggtacgcgggccgacattgtcggagcggatcagccgcaggcggttgagccgttcgatgtcggtgagttttgtcgggctgggcgagcggtcatgcatgggaggcccagcttcgcccaaccagagattgtgatcaactgcgacattggcgccaccgcgcgtgacgcgctaaaagcagccgccaacatcaggaagctcccatgatctcacttgccgactttcaagcgcgtatcgagcagggcgcgctgttgccggatgccgccatcggccaatcgctggaggcgatccgcgcacaggacaatgcgatcggggccttcgtccgccatgatccaagggcgcgtgcgcaaacggccgggcctttgcgtggcatcgcggtcggcatcaaggacatcatcgataccgctgacttcccgaccgagatgggcgctgcgatctatcgcggccatcagccgcgggccgatgcgcctgtggtgatggcgctgaagcaggctggcgcgaccatcatcggcaagaccacgacgaccgcgttcgcggcgaatgatccgaccgcgacggtcaatccgcgcaaccacgcgcacaccccgggtggatcgtcctcgggctcggcggctgcggtcgctgccggcatggtctcgctggcattggggacacagaccggaggctcggtgatccggccggcctcgttctgcggcgtcgccgcgatcaagccgagctaccggctgctgccgaccgtcggcgtgaagtgtttttcatggacgctcgatacggtcgggttgttcggcgccggcgtgcgcgatgtcgcgctggggctggccgcgatgacgaaacggactgatcttgtcgtgccatcggctgtgccggcgccgcggatcggcatggtgacgcaagccttcgccggcgcgcccgaaccgtccggcgcggaggcgttgcagcgggccgcacgcgccgcggagcaggccggcgcgacggtgcgtgagattgccgtggccgacgtcatcgcggaggcatggcggatccatcctgacgtgcaggagttcgaggcgcatcagtcgctcgcctgggagtatgggcagaactacgaggcgatgccgccgctgctgcgtggccggctcgacgagagcaaaggcggcacgcccgccgagtacgacgcggcgatggacgtcacgctgcgggcgcggcaggcgctggccggcattttcgacgaggtcgacgtgctgctgacgctgtcggcgccgggtgccgcgccgaagggactgacgtcgaccggcgatccccgttacaaccggctctggaccttgatgggcgtaccctgcgtcaacgtgccgacgctggttgccgaagcgggattgccggtgggagtgacggtgatcgcgccgttcggcggcgatgcgaaggcgctggcggccgcgagttttgttgaggatgcgttgggaaaataacgactgtcattccggggcgcgacgaagtcgcgagcccggaatccatttcacagcgacatctgcggctcgatggattccgggctctcgctacgcgagccccggaatgacggagagatctatttcttctcgccgatcttgccttcggtgccggcctgcaggcgcttgatgttctcgcggtgcatgtagaacagcagcagcgtcagcacggcgaacagcgaggcgagcgcgctgtggccgaaccaccacaggaacagcggcgtcacgaacgcggcgatcagcgccgacagcgacgagtagcgcgtggtgtaggcggtgccgagccagatcacggcaaagatcagcgccgccggccagaacaggccgagcagcacgccgagataggtcgcgacacccttgccgccgtggaatttcagccagaccgggaagaggtggccgaggaatgcccccagcgccgccagcattgccgcattcgggccaccgatcgtccccgcgatgatgacggcgaccgtgcccttcagcatgtcgccgatcagcgtcgccgcggcgaggcccttgcggccggtgcgcagcacgttggtggcgccgatattgcccgagccgatggtgcgcagatcctgcgtgccggcgagcctcgtcaggatcatgccgaacgggatcgagcccaagagatagcctatcagcaaggcggccggcaggaacgcgtcagcagacatcgcggtggctccctggacagccgggacggtccaattcggacgaatccatcaatgaaatattaaccatcaatccgcaccatggccgtggaaatgagggagcttatcatggcttctgttcgcaggcggctggagcaggttttctttgtcgtttacgtcgcggccatcgtcgttggaacgacgatggaggcgatgtcgcaactcgcggcgcgctaggttccactctgacttagacgtgctcgtacacggtgcgtccaccgacgatggtccgcgtcacgcggcccgagaagcgggcgtcgtcgaacggcgtattcttgcacagtgatttgagatcgtcgcgatcgagcacccagggtgtgtcggcatcgatcacgatcacgtcggccggggcgccggcgcgcagggtgccgcccggcaggccgagcagttcggccggccgcgtcgacatcgcccggatcagcgtcttgaagtccatctcgccattgtggatcagccgcagcgccgccggcagcatggtctgcaggccgactgcgccgctggccgcttccgcgaacggcaaccgcttgacctcgacgtcctgcggattgtgatcgctcatcacgacatcaatcagcccggaggccagcgccgcgaccagcgccctgcggtcctcctcggtgcgcagcggcggcgccagcttgaggaaggtgcggtaggggccgatgtcgttttcgttcaaggtcacatggttgatcgagaccgaggccgaaacgttgtggccggcgtcgcgggcacgcttgaggatctccagcgactcggtcgaggtcagcgaggccgcgtgatagcgcccgccggtcagccccgcgagccgcatgtcgcgctcgagcatgatcgattcggcggcggtcggaatcccggcgaggccgagccgggtggcgaactcgccttcgttcatgacgccttcgccgaccagatgcggatcctcggtgtgatgcacgatcagcgcatcgaaatcgcgggcataggtcagcgcgcgccgcatcacctgggcgttggtgacgctgcggtcgccatcggtgaaggcgacggcgccggcggccttgagcaggccgatctcggtcatctcctggccctgcatgcccttggtcagcgccgccatcggatggatgttgacgatcgcggtgtcgcgggcgcggcgcagcacgaagtcgacggtcgccgaattgtcgatcactggcgaggtgtcgggctggcagatgatggtggtgatgccgccggcggcggcggcctggctggcggatgcaaaggtctcgcgatggctggcgccgggttcgccgacgaaggcgcgcatgtcgatcaggccgggggccacgatcttgccggcgcaattgacgatgtcggtgccttcggggacgccggcggcaccgatgccacgcttggcgtcacggatcacgccgtctgcgatcaggacatcgcccggaccgtcgaagtcgcgggagggatcgatgacgcgggcgttggcgagcaggatggggcggcggtcagtcagcatggcgtcacgcgttcggcaggttgcgggcgagcgcttcgagcactgccatgcgcaccgccacacccatttcgacttgttcacggatcagcgattgcgcgccgtcggcaacgaaggtgtcgatctcgacaccgcggttcatcggccccggatgcatcaccagcgcgtccggcttggcgtagccgagcttcttctggtcgaggccgaaatagtggaaatactcgcccgacgacggcacgaaggagccgttcatgcgctcgcgctgcagccgcagcatcatgacgatgtcggcgccgttcagcccctcgcgcatgtcacgcgcgacctcgacgcccatccgctcgatgccgggcggcagcaaggtggagggagccaccacgcggacgcgggcgcccatcgtgttgagcaggaagatgttggagcgcgccactcgggaatgcagcacgtcgccgcagatcgcgatcacgagcccctcgagccggcccttgttgcggcggatggtgagcgcgtcgagtagcgcctgggtcgggtgctcgtggctgccgtcgccggcattgatcacggaaccgtcaaccttgcgcgccagcagctcgaccgcgccggaggcgtggtggcgcaccaccaggatgtcggggtgcatcgcgttcagcgtcaccgcggtgtccatcagggtctcgcccttgcgggtcgacattgatgacaccgacatgttcatgacgtcggcgcccaagcgttttccggcgatctcgaacgaggactgggtccgggtcgaggcctcgaagaacagattgacctgggtgcggccgcgcagactggcgcgtttcttgtcgacctggcggttgagctcgacatactcctcggagaggtcgagcaggcccgtgatgtcgtcagcggaaaggccctcgatgcccagcagatgccggtgaccgaggacaaaagtcgatttcaatgatggggtcattaaagccagagctataggcgcggatggccggtggggcaagcgcgaagaggggcctcaggagttttccccgagtaagatgcggcagggcttcccggcggccacggcacggcttccgcccggcatccgcgccttgcttttgcaggcgtttccggaacaagaactggagcccgggatcaacccggcgatgacgccggagcgcgcgctcgtgaaaattgtcgtgatcgtcatcgctgttgcggggctggtctggccggcccttgcccaggggctgccgggcgacttcgtgttcctccgcgatgtcgatccgaccatcatccaggacatccgttacgccggtgcgaacaacttcacggggcggccgatcgcggggtacgacgcggcggaatgcgtggtgaagcgggaggtgggggtgcgcctcaaggccgtgcagcaggagctggcgcggcaacgactgtcgctgaagatgttcgattgctaccggccggcccgtgcggtcgccgacatggtggcgtggtcgcggaacggcaaggagaccgctgccgaacgccgctacaacccggcgttctcgaaggcggatttgttccgcctcggctatatcgccactcattccggtcattcgaccggcgccgccgtcgatctcacgctggtcgatcttggcgccgacaattcgcgcaaattcgatccggccaaggattatgccgattgcaccgcgcccgccgccgcccgcgccccggagggcagtgtcgacatgggcaccggctatgattgttccgacgtcaaggcccacaccgctgcgagctcggtcacgccggcgcagcggcgctggcggagcacgctggtcgcggcgatggcccggcaggggtttgccaactattcaaaggaatggtggcacttctcgctgccgggggcgggcggcgccgcctacgatttcccgatcgtgcgggcgcgatagcaccggattttcctcaaatccgaagcatgtgcgcaacccaatgcttgccctcgcaacggcggcggcgcgcgcattcaacactccttaattgccgcgcctatcatgggcggacgaacgggagcacggaacatgcgtctggcaggccttgcgatcatcttggtcggtgcgatcggcgtcgtggcctatgaccagtacgacaagaccacgaactacacgcgcgtcgacgcgcgcatcagcggcgtcagcgaccaatgctatctggaaagggtcgagcgcggaatcctcaccaagaccaggtggacctccgacatggtccgttgcgaagctgccgaagcgctgcggaaagacaatccgaagtggcagggctacgatgtgagacacaagatcgaggtccgcgtcgcctatgtgtcgccggtcgacggggccacgcatcagtcggtgctgcggatgtcgtccttcccctgcggccaagcgctgcacgccggcgatctgcttccggtactggcgtccaggaccaaggtggacaggacgcgtttgacctgaccgtctggcgtgtactttttgctgccccgcgccgggtcgcaggcctatgatccccgcgattccatcgcgctgccgccggcgcatgatcctggcccgtgcaggccggcgttcccggcattgcgcgcagaaagatcaatcccgaggagaccatgacgcaggctccgtttgccacgcacgacgtcctcaaccagtcgccgccgtttgaggatatcgacttcttcgcggccgacgcgccgctcgtggccgcggtggccgccaatggcggggcgccggcgtcagctgaactctccgatttcggcaagcattggggctccgccgtgatggcggagcgcggccgcgtcgccaatgaaaacacgccgaagctgcgcagcttcgatgccaggggcaatcgtcgcgacgaggtcgagtttcatccggcctatcacgagttgatggcgcactccgctcatgccggggtgcacaactcgacctggaccgcggacggcaaacccgccggcggcgcggccgaggtggtgcgcgcggcgaaattctacatcgcttcccaggtcgagaccggtcacctctgcccgatcacgatgacgcgcgcctcggtcgcggcgctggcctcgcaaccggacatcctcgcgaaaacgatgccagtgatcggcacgcgcgcctacgacccgagctttgcgccatggtgggccaagcgcggcatgacgctcggcatgggcatgaccgaaaagcagggcggcaccgatgtgcgcgccaacatgacgcgtgccgagcccgatggcgacgcctggcgcatcaccgggcacaaatggttcatgtcggcgccgatgtgcgacgcgttcctggtgctggcgcaggcgaaggatggcctgagctgcttcttcatgccgcggtttgcgcctgacggcaccgtgaatgcgatccatttccagcgcctcaaggacaagctcggcaaccgctccaatgcctcgtccgaggtcgaattccacggcgcgcatgccgagttgatcggcgaggagggcaagggcatccgcaccatcatccagatggtgcagctgacgcggcaggattgcgcgatcgcgtccgccggcctgatgcgatcggggctggcgcatgcgctcaaccatgcgcggcatcgcagcgtgttccagaagcatctcgccgaccagccgctgatgcaggcggtgctgtcagacatggcgctgcatgtcgaggcgtccgtcgcgctggtgatgcggctgtgccgcgccttcgatcgcgcgggagccgatgcaggcgaggcggcctatatgcggctgctgacgccggcgatcaaatactggacctgcaagagcgcgcccggcttcctctatgaggcgatggagtgcctcggcggcaatggctatgtcgaggagggcattctggcgcggcactaccgggagtcgccggtcaacgcgatctgggaaggctcagggaatgtgatgtgcctcgacgtgttgcgcgcgctcggccgcgaggccgatgccgcgctcgtcgtgctgcgtgcgctggccgacgagaccgagggcctgccgggtgccgccgaggcggtcgcatcgatcgggcaatcgttccgccgccccgacagcgagcgcatcgcgcggcttgcggtcgagaagctggcgctgctggcggcggccgcggcgctcaaccaggtctcgcagaagagtgccgaactattcgcggcgacacgtcttgccgaacgccacgccggcatgtacggcgcggtggatctgtccgacgccgatcagcgcgcgctgctggcgcgggcgctgccatgaaggtttgctgatggacgcactcaatcccgatactccgccggcttccgtcgaaccgccaccaggtcccccgcgggtctggaaattctggggcaccgcgctgtggggccttgtgatcttcgccgcgatgttccttggccaggtcgcggtcatcatctggcgcatcatcgcgcagggcggggaactgtcggcggccggcatcacccacgtggtcgccgacggcctgaccatctcgctctcggtgcttgccggcctgccgatggtgctgctgatgctgtggttcgccatccgccgcaggcggatcccgttcgccgattatctcgggctgcgcgggacgtcgtggaagaacgtgatcatcggcatcgtcgcgctcgtcgtgctggtcggcgcctgggacctggtgtcccgcgccgcagggcgcgaggtgacgccgggcttcatgggcgacgtgctgaaatcggcacaggagcacagcgcgctgtggctattggtgatcgccttcgccgtggccgccccgctctgggaggagctgtttgcgcgcggctggctctatcgcggctggtcggagagctcgctcggtccttacggcgcgatcctgctctcgtcgctggtctggaccgcgatgcatctgcaatatgactggttcttcctgtgcgaggtgctgtcgatcggactcctgttcggctatctgcggttccgcaccggctcgacctggctcaccatcctgctgcacggactgaacaatctggcggcgacgatccagacctggtggctggcggggtgagcaaggccatccgatgatttggaatcgcgcacacactgtgaacgactattaagacgggcctcgacttgggatcgcagaggtctaaggccctgccgcggcgatcacgatcggcatcgtgatcgcggccaggatcgtctgcagcgtgatgatctgggcgagcaggggagcgtcgccgcccatctggcgcgccagcacataggctgagggcgaggtcggcaccgcggcgcaggcggcgacgatggcgagattggcaccggcgacgccgaaccacaccgcgagcgcgaccgtgagcaccggcatcagcaccagcttcagcaccagcgcgatgctggcggcgaggctgggacggaagatgccttccggatgcagcccggcgccggtcaccagcaggccgatcgccagcgacgagccgccgagcgcgtcggcgacgtcatgccagatctgcggcagcgggatatgcgtgacgttgatgacgagaccgatcacacaggcccagatcagcgggttcttcagcaccgtcatcacgatggcgctcacggaccgcttctccgaggaggcatatctcgccagcacggcgacgctgaagacattgaccagcgggatgatggcgaccatcgcgaccgaggcgagcgcgagacctgtgctgtcatagagattgcgtgacaccgacagcgcgacataggtctgccagcgcgtcgcgccctggaagatcgaggtgaaggcggggccatccaccccggcgcgggcgagcgggccgcgcagcgcgaggcagagcaggcacatcaagagcgccgcgagcagcaacgcgccgccgacgccggcgaccggaaccttggtcaggtcggccttgaccagcgtctgtaccaacaggacggggaacagcacgtaataagtgagctgctccagcccatgccattgcgtgtcgagccgcatcagcgtgcgcttcaggacgaagccgagcacgatcagcaggaacaccggcagcagcgccgcgatcaccacggccacggtcagcggtccccgcgcagctttgcgagccggtcgagcgcgccctgcaggatgaagatcgcggcgtgctcgtcgatcacctcggcgcggcgggcgcggctgacatccatcccgatcagctcgcgctcgaccgccgcggtcgagagccgctcgtcccacagcccgatcgccagcgcggtgaggtttgagaggttgcgggcaaaggcccgggtcgattgcgcgcgcgggccttcgctgccgtccatgttgatcggcaggcccagcacgaaaccgaccgcgttgcgctcggctgcgatcgcgagcagccgcgccgcgtcgaccttgaactgcttgcgctggatggtctggacaccggtcgcgagccgccggtccggatcggagacggcaacgccgatcgtcttggtgccgaggtcgaggccgaccagcgcgccgcggtcgggccagtgcggcgcagcttcgatcaggggaaggatgggggcaggcatggaccagcgcttagcacgcagccgcgcgccgaggcaaagcccggcgtcgggcgggcctccatgcgaaaacgccgatcaggcagcgatcacccgatcgtcgccaccgaggcacgcgacgaggccctgcaacggactgtactggtgtgcggtgcggcgctggatgaacagcgtctcgacctgcgcatgcttcggattgagcttgtggatattgatgtcgcgctggacgtggtcacgctcgacgaccgcgcgcggcaacagcgtcacgcccatgtcggcggcgacgcagccgaccatgccgtcgagcgtgccgagttcgaagcgcgcggccgacggccagccgaactcggtgaacacctgttcgaggcgctgccgataggtgcagccggtgcggaacaccagcgcggtggggcccgattccggtgtgccggcgcgcaaggcggcgagcgacttccagcgctgcgcggtgacgagcaccagttcctcggtgaaggccgatgtcgcggacagctcggcatgctcgatcggaccggcgacgaaggcgccatcgagcgagccgtcgagtacggcggcgacgagatcggcgctcggcgcggtgcgcaaggtcaggcgcaccgccggatagcggcggtgaaactcggcaagcaacgtcggcagccgcaccgcagcggtggtctccatcgagccgatcgacagcggccccttcggctcgccgtcgtcgcgcgcggcgagcacggcttcgcgcgacagcgccgccatgcgctgcgcatacggcagcaggcggcggccggcgccggtcagcgacatgccgcggctgtgccgctcgaacagcgcggtgccgatctcggcctccagcgccttgatgcgctgggtgacgttggactgcacggtattcagctcttcggcggcccgggtgatgccgccgagccgggcgaccgtggaaaaggtgagcaggtcggtcaattccatctgggaccaccgtttcaatttagagatggcagcgttctctagtattcattttcgcagaatgttaggcccgcttaggcttggagtccagaacagcaagtccagaacagggagcaagcgcatgccgatcggcaccgaattgacggcgcgtctgggcaccgaacatccgatcctggcggcgccgatggcgatgatcacgggcagccggctggtgaaggcggtgagcgaggctggcggcttcggcattctgggcggcggctatggtgagaaggcctggctcgaggcggagaccgcggcgctcaggggatttcgccgtccgttcggcatcggcttcatcacctggagtctcgccaagcaacccgaactgatggacatcgcgctggaggcgcggccgcgcgcggtgatgctgtcgttcggcgatcccgcgccgttcgcgcctgatatcaaagccgccggcgcgcttctgatctgccaggtgcagaatgaggagatggcgcaagcggcgctcgattgcggcgccgacatcctgattgcgcagggaacggaggcgggtggtcacggcgcgtcgcgcaccacgctcgacatcgtgcctgcgatcatcgatttcgcggcaggacgtgtgcctgtggtcgcagccggcggcatcgctgatggccgcggtgtcgccgcgatgatgatgctcggcgcgtccggcgtgctgatgggcacgcgcttctatgccagcgtcgaggccgacgcgcccgagcgggcgaagcagttgatccgtgcggccaagagcggcgagacggtgcgcggcgtcgtgatggactggtcgcgcaagctgatctggccggcgccgttcacggcgcgctcgcttgccaacgatcacctgcggcgctggtccggccacgagatcgagctgatgcagcgggtggacgagatcgctgtggaatatgccgcggcgcggagcgcgggcaatttcgacattgccgcagtgtttgccggcgagtccgtcggcctgatccatgatatcgttcccgcggccgagatcgtcggccgcatcgtcgccgaagccgagcagtcgctgcagggccggcgcaacttttcaccttctccccttgtgggagaaggtggtcataggcggcctccggccgccgtatatgagtagagaacgccgatgcgtggcatcggctatgtgcaatccgcaccggatgaggggtctgtatctgcggagaggaacccctcacccgacttcgatgcttccgcatcgaagtcaccctctcccacaaggggagagggtaattccgagcaagccaggaaagagacacaccatgtggccggaccgtcgattgatcgatcgcttcaagaccgaattcccgatcgtgctggcgccgatggccggcgtgatggatgccgacctggtgatcgcggtggcgcagggcggcgggctcggctcgctgccatgcgcgatgttgtcggccgagaaggcgcgagagcaggtcaacatcatccgccagcgcgtgtctgcgccgatcaacctcaatttcttctgccacaaggcggtcgatgccgatccggcgcgcgaggcacaatggcggcagcggctcgcgccttactaccgcgagcacggcctcgatcccaacgcaccgatcaacgcggcgaaccgcgcgccgttcgatgcggcgttctgcgccgtggtcgaggagctgaagcccgaggtcgtcagcttccatttcggcctgcctgagccaaaactgttgcaacgggtgaaggggacgggcgccatcgtgatgtcgtcggcgacgaccgtgaaggaggcgatctggctcgaggagaacggcgccgacgtggtcatcgcgcagggcgccgacgccggcggccatcgcgccatgttcctgaccgatgatatcgccgagcagccgggcactttctcgctgctgccgcaggtggtggatgcggtgaaggtgccggtcgtcgcggcgggcggcatcgccgacgggcgcggcatcgcggcggccttcgcgctcggtgcctcggccgtgcaggtcggcacggcctatctgcgttgcccggaatccaaggtgagcgcgcagggccgtgtcgcgctggcgcaggccagcgatgaatcgaccgtcatcaccaatgtgatgaccggccgtccggcgcgcggcgtcgccaaccgtgtgatgcgcgaggtcggcccgatctcgcctgacgcgccggcgttcccgcacgcggccaccgccctcgggccgttgaaggcagctgccgaaaagcagggcaaggtcgatttcaccaatctgtgggccgggcaggcggtgcggatgggcaaggagatgccggccgccgagctgacccgcgcactcgccggcgcggcgctggcgcggatgggggcgctgtctcaggcctgacgcgcgggctcgtcccggataatttcaaggtgctcggtcgcgagcctgcggtaatgcgcggccatttccttgtaatgctgccgcgagatcgggtccgcggcgctttcggcgcggcgctcgaacatctcggccttttcctgcaaggcccttgcctgggacatggccatcgctcgcctcgctcagaccaggcaggccacgtaaacgattgcgatccccagcactgtgccgatcgaccacagagcagggtcccagccgtcggaccgggggcggctttcgagcattgacatgacgcgctccgaacttttctgtttgaacggagtaggcgccggcaatgtttccggacgacttcgtggcgggcgggaagtggtttcgtcgtgggtttcgcagccgcaatgtctcgcaccgggggccggcggagcgtccaagccccggggggccggattggcgcggttgcggcgcaaaaccggcctctgctatacggcaggctgacctttcagcctgaccacccgaggccctatataatgtccgtagatgccacgaccgtccgccgcatcgcgcatctggcgcggatcgcggtcagcgacgccgaggttccccatctccagggcgaactgaacgcgatgctggcctttgtcgagcagctgtcggaggtgaatatcgagggcgtcgagccgatgacctcggtgacgccgatggagatgaagaagcgcgccgacgtggtcaatgacggcgagattgccgatatcatcgtccgcaatgcgcccgacaccgcgaacgacttcttcctggtgccgaaggtggtcgagtagtttctctgttctgggacgatggcgatgtgtctgctctgcgacgatgagaaggcctacaaggcctacatggacttcctcgatgcgatggagcgcaaggggaaggtcgccgatcccaacgcggcgatggacgccgtcctcgaccatctcgaggcgcttgacgctgcccgcgccaaggaaaatgccaacaaccgggcgcgccaggacgaccccgccaacgacaagaccctgtctccgttcttctgcagcccgatcaataaatgaccgatttgacatcgctgacgatcgccgaggcccgcgagggcctggcgagcaagtctttcaccgccgctgagctgaccgatgcgcatctcgccgccatcgaggccgcgcgggtgctcaatgcctatgtgctcgaaacacctgaccgtgcccgcgagatggcgaaggccgccgacgagaagatcgccaagggcgagggcggaccgctggccggcattccgctcggcatcaaggacctgttcgcgacccgcgatatcaggaccacggcgtgctcgaagatcctcggcaatttcatcccgccctacgagtcgacagtgacctcgcagctgtggcgcgacggtgcggtgctgctcggcaagctcaacaatgacgagttcgcgatgggctcgtcgaacgagacgtcgcatttcggcccggtcaccaatccgtggcgacgcgagggcagcaacaccacgctggtgccgggcggttcgtccggcggttcggcctccgcggtggcggcgctgctctgcatgggcgcgacggcgaccgacaccggcggctcgatccgccagcctgcggcgttcaccgcgaccgtcggcatcaagccgacctacggccgctgctcgcgctggggcatcgtggcgttcgcgtcctcgctcgaccaggccggcccgatcgcgcgcacgacgcgcgacgccgcgatcctgatgcgctcgatggccgggcacgatccgaaggacaccacgtcggtcgacatcgccgtgccggactacgaggccgcgatcggcaagtccgtgaagggcatgaagatcggtattcccaaagagtatcgcctcgacggcatgccggccgagatcgaaaagctctggagcgagggcgcgcaatggctgaaggccgcaggcgccgagctcgtcgaggtgtcgctgccgcacaccaaatacgcgctgccggcctactacatcgtggcgccggcggaagcctcgtcgaacctcgcgcgctatgacggcgtgcgctacggactgcgcgatcccggcaagaacatcatcgagatgtacgagaacacccgcgccgacggctttggcgacgaggtccgccgccgcgtgctgatcggcacctacgtgctctcggccggctattacgatgcctattatctgcgcgcgcagaaggtgcggacgctgatcaagaaggatttcgaggactgcttcgccaagggcgtgaacgcgatcctgacgccggcgacgccgtcggcggcgttcggcatcggcgagaagggcggcgccgatcccgttgagatgtatctcaacgacatcttcacggtgaccgtgaacatggcgggcctgccgggcatcgccgtgcccgcgggcaaggacagccagggtctgccgctcggcctgcaactgattggccgtccgttcgacgaggagacgttgttctcgctcggcgaggtgatcgagcaggcggccggccgcttcacggcgcccaaatggtggtgagcaatggcggattttcgcgccactctcgctgacgctgcgcctgacgcggcgttgccgccgccgctcgccgcattgtggtgggcaaagaagggcgattgggaccaggcgcaccgcatcgtgatgaatgagagcgacgccaactcggcctgggtgcatgcccatctgcatcgcgtcgagggcgatctcggcaatgccggctactggtatcgccgggccggccagccggtcgcaaaggacgcgctcgaggccgagtgggagcggattgtttccgcgcttctggcctgacgtactggtgccggacgttggtgtcttggcaccgcgagcattaaccgtgtttcggccgccatgccgccgcccagattggccgtgataggctggtggaacggggcgggggccagtggcaaagagagtattcgtgcgtgggtcgggcatagggggatggctgtcagcactgctggtggccgtggtggcagcgggccttgccggctgcgcttccgtctataatctgcccggcaatgtgccgctcggtgccgcgctcgccgacaacagcagcgcccgcgaaattccaccttacgaagatgacctgctgctggcgctgtcgttctccggcggcggcacgcgcgccgcggcgttctcgttcggcgtgctggaagaactcgaccgggtgcgctccagcgccgccggcaccaagacgctgctcgaccgcgtcgacttcgtctcgggcgtctccggcggatcggtcaccgccgcctatttcggattgaagcggcgcgcggcgctcgccgatttccgcgaacgcttcctgctgcgcaatgccgaggagggactgaagaccaggatctcgctcggcaatatcgggcgcgcgctgggcggcggcgtcaacgacagccagttcaccgactggctcgaccagaacctgttcgacggtgcgcggttcgaggcattgcccgacgatcgccggccgcgggtgtggatcaacgcgtccgacatctacaaccgcacgccgttcgtgttcggcaagacctcgttcgacgcgctgtgcagcgacatccgctcttatcgtgtcgcagaggccgtggcggcatctgccgcggtgccgctggcattcgccccgatcgtgctgcaaacctatcccggcggctgcgccgccccgctgccgccctggtacgatcgggtgcgcaacgatccgaacgcgcaaccgttgctgcggtcctatgccgaggcccaggcgcgctaccgcgacggctcgatgcgctacgtcaagctgctcgatggcgggctggtcgacaattacgggctgtcggcgctcagcatcggtctgctcgccgcgcagcgtccttacgagccgctcgacgagcgacaggcggccaagctgaagcgcatcctgttcctggtggtcgatgccggccgcggcgtctccggcgatttcgtgcagacgctcgaaggaccgaacggtgtcgagctggtgtccgcggccgccgacaccgcgatcgatgccagcgtgcgctcgagctacgccgccttcacgtcgctcgccagcgactggtcgggcaagctgaagcgctggcgctgcggcctgtcggcggcggatcggagccggctcggcgtcggcgccggctggaagtgcggcgacgtcacgatctatgtcgagcggctcggcttcgaccggctgggaccggaacgcgccggtatcctgaacgccatcgcgacgcggctgtcgctgccgccggagcaggtcgaccagctgatcgtgggcggcgcggacgcgctgcgcgccagcaaggcctaccagcagttccggcgcgggctctgatccgcactcatgcgctggcgcggggtctcaagggaccgcaaaggggacagtaagcccgcttgactggcgcggtcggttgcgcgaagcccaatccatcccagatatgacttttatccggaaaccgagatccatgaccgcagctgccgccccgcataaactgatcaagagcgccaccggcgattgggaggtcgtgatcggcatggaggtccatgcccaggtcacctcgaactcaaagctgttctccggcgcatcgaccgcgttcggcggcgagccgaactcccatgtctcgctggtcgatgccgcgatgccgggcatgctgcctgtgatcaacgaggagtgcgtccgccaggcggtgctcaccggtctcgggctgaatgcgaagatcaatttgcgctcggtgttcgaccgcaagaactatttctatccggactcgccgcagggctaccagatcagccagtacaagtcgccgatcgtgggtgagggcgaggtatcgctcgagctcgacggcggccgcagcgtcaccatcgggatcgagcggctgcacctggaacaggacgccggcaagctgctgcacgatcagtcgccgacgatgtcctatgtcgacctcaaccggtgcggtgtcgcgctgatggagatcgtctccaagcccgacatccgcgacgccgagcaggccaaggcctacgtcaccaagctgcgctcgatcctgcgctacctcggcacctgcgacggcgacatggagaagggcagcctgcgcgccgacgtcaacgtctcggtgcgccgttacggcgagaccgcgttcggcacccgctgcgaaatcaagaacatgaactcgatcaacttcatcggccaggcgattgagtacgaggcacggcgccagatcgagatcatcgaggatggcggctcgatcgaccaggaaacccggctgttcgacccgaacaagggcgagacgcgctcgatgcgttccaaggaagaggcgcacgactatcgctacttcccggatcccgatctgttgccgctcgagttcacccaggccttcgtcgacgacctcaaggcgcagctgccggaactgccggaccagaagcggtcccgttttgttacgggcttcggcctgtcgccctatgacgcaagcgtgctggtcgccgagcgcgagagcgcggagttctacgagacggtgcttgcaggccttgccgacaaggcgcgcgacggcaagctcgccgccaactgggtgatcaacgagctgttcggccgtctgaacaaggagagcgttgcgatcgcggcctcgccggtgtcggcgcagcagctcgcagcgatcgtcgatctgatcggcgagggaacgatttccggcaagatcgccaagggcttgttcgagatcgtctggcaggagggcggcgatccgcgcgcactcgtcgagacgcgcggcatgaagcaggtcaccgacctcggcgcgatcgagaaggtggtcgacgacatcatcgcggccaatcccgacaaggtcgagcaggcaaaggcgaagccgcaactggtcggctggttcgtcggtcaggtgatgaagtcgtcgggcggcaaggcgaacccgcaggcggtcaacgacctcttgaagtcgaagctcggcatctgaaccaacaggacaatgatgttgtccttggcgcatgatccgaccggatcatgctcccgtgcgatcaccttcggcttcgtcgcgcgcgcgtgaacgcggcgtgatcccagctcacagcctcccgcgacggcgcactgacgccctcgacgccgaatcggcgaagctgcgattcgttcgcgaaaccggctcggatgaccgcaaacgaggcaaaagccgtctttcccacgaaaattttttcattgccaaaaattacgactcggcgtccgcgacgcgccgcttttcgtcgccgctcgcgactcagcgcaacgacgctcgcgcgtcgatcgcttcaatgcgaattcaatgaaagcctacaatacaaggcatttcctgcaacgttgacaaatgccgatgtcgacagctgttgcacttcttgcatcgtcgcgcgaatgcatcgccgatttgaactgcgccgcgcgctgcgtgcgctgccatcgctgcgtcaacacttccttaagcgggacactgtttttttcggtctgttggtgtattcgggaagtagtgcatatcgattcccgagtgcacgcagcgaactagagagccatctcacatactggagggcaacatggctaagaaggcaaagaaggcgaagaaggttaagaaggcgaagagcgcggtgaagaagactgcgaagaagacccgcaaggtcgccaagaagaagtaagcctctcgccttgagaggattgccggcggcttgacgccggcacgtcgcgagagccagcggacggactgctgagaggcacatcccacccccaaggctctggctgacgaaagagggtgtcggcgagacatcaggtcaaacggctggatcgaatttcggagagggcgaccttcccaaaaccggtccggcagaagaaacagagatttcttcgttcggtgcgggacccgcttggttccgcaatttcaccggcgacaatgccgactgaaatctggtcctgacgtgttcgccgaccccctcgttccggcggcttgcgcagtccgcgccccggcaaccatcttcccatttccagttctggtccgacgtcaggcttcacggcctcgcgtggcatgcgcgcgcgtacccggctgcacgccgttcggcggatcgctcgcggtcacaccaccccttcggtcaatctcgagactgactgcccgccgggtcggcgggcatgcgcgggccattgtccgccatggttatcgttgtccgaaacaccacggtaaaccggcgttcacgaatacgcagaaatgcctgcggcacaggcacttctgcgattcagcgcagcgcctccggcggcgccggtttacatcccgttcatcgcgatacttaaaccgctcttcaaatttgatgggccatgatcatccccacaagccggcaaacggcgagcgaataacgggacgtttgaacagtggacgggggccgcgctcgggggagggcggccaacaacaaaaaggggaatgacgataatgtttcagggggtcatcgatcaggaaagcgcggtcccggttgctgcgactgcaatccaggacgtgctgttcgagcgcggcatgtattgggcgagcggccgttccggcgtggtcaacctcgtcgcggcgcacaaatggttcaacctggcggcgctcaagggacgtaccgacgcgatcgcgcaccgccgcgaagtcgccgagcagatgtccgatgtcgagatcgcggctgcccagcgcgaagcccgcgcctggatgacgacgcattaggtttcgtttggcgcgttttctccgcgcgaaccggtaaccgcttcgcgcgaaaacgcccaagcctagcagctctcgagccgggagcctcggctccctcgctccacctagaaccagtatcgcgcggcgtagagcacggtcatcgccgctcccgccacaatgacgaactggcggacgatggtcgcgggaagcacccggatcaggtgacctcccgcatagccgccggccatggcgccgagcagcatgacccacgtctccggccagcgcaccgctccctgcacgatgaagatcgctgtggcggcgagcgacacgcaggtcgcaagcaggttcttcaacgccttgatcgccctgatatcgttgggctccgtgaccgacagcgccgcggtcaggatgacgccgagcccggcgccgaagaacccgccatagacacatgccagtcccagcacggcagcgctcgcccgggtcgagggcagggtcgcggtcttctgctgcccgatggtccagctctggatatgcggcgcgaaggcaaacaacagcgtcgcgaagccgatcagggccggcaccggcagcacgaatagccgctcgggaagcagcagcaggacgccggcgccgatcgcgccgccgagcgtcgagacgaggacgaggctgatcgtgcgccgtgtcggcggcggcagcttgccgcgatcggcgagcgcggcgatcagatgccccggcgagatcgccaccgcgttcgatgcgttggcgatgatcgccggcaagcccgccgcgagcatcgccggaaacgtgatcagcgtcgcgccgcccgccaaggcgttgatgatgcctcccgcgataccggcggcgaacagcagaaggcctgtctggatatccatgcgtcacccaattcgagggtgagcaggctagcgggcggggccgcggtccgtctggaacgtctgtgacgccgcttcagtcacgccaatagacgcccggtgtggtgccaaaggtgcggcggaacagacgggtgaggtggctctggtcggagaagcccgcatcgaccgcaaccatcgcgatcggatcgccggcgcgcagcagctgtcgcgcaaaattgagccgggcgagcaggcggaacgcatgcggcgcgacgccgagctcgcgcctcaccatgcggctgaacccttcgcggcttcgcccgaagcctgcggcgatctcgcagatcggctcgaggctctccttcagagcggcgccgagccttgtccggccggcgagcccggccgatggagacggctcgcgcgcgccgatgtcgcccgcgatatcgaggatgtactcgggcgatatctcctcgacgcgtcgaaagcgcccctcaacgcggatgatccggaccgacgaggcggcgcggctggccggaaaataagcattgaggcaaaccgtctcctcgtccggtgtcggtagcggcgcatgcaacattccggcgggaatgagcgcggcatggccggcgggcacagttacggtggtgccgtcgatgcgaaaggcgcgcaaccccgacagcaccagcacgatctggctctcgtcatgaaagtgcggcttgaggccgagcgaaccggcgccgtgccacgatgccagctcgacgatgccgtcacggtcggctcgccgataggtccaggcattggtcatggcgaagcgtggggtcacagaggtctcgaaccgaggaggcggtgatccccgagcctagcactgatgtcaccggccgtcatagcgacgtcaatgctgcgtgaccgagccaatcggcgaggcggttcgcatcgtcgcggcagcgatgagggcggcgacgaggttggcggctgcgctgatcgccaccggaatgaagtaactgtggctgatatcgaaggcgaagccggcggcgctcggacccagcagcgtcccgaacgcgacgctggtgtagaggatgccgatgatgccgccgacattgcggccgccgaaatggtcggtgaccacggcgggcaggatcgcgacccagccgccatagaacacgccgaacagcagcgcgaacactgtgagcgaccagaaagtgcctgcgatcgcccagatcgcgagcgcggcggccatgccgagatacatcgcaatcaggaacgcatcgcgccccatcctgtcggcgatgccgccgaggaagaaccggccggcggtgctgccgacaccgatcattccgagcagcagcacggcaagcgccggcgccacctgatgatcgatcgcgaacggcaccaggtgcacgaagggcacgaacacgccgaacgcgctgatcaggcaggccgcgtagagcccggcgaagcgggcggttcggaccgcaccgaggatcgaaacgccttggcggagtgccgtgcttgaagccgcctcaagcggatcaccgtccggtccggtgccgtagcggcgcggatcatccgcgatcagcagcgatgcgccgatcccggcgacggcggcgacgacgcccagcacgacgtaggcatcgcgccagccgaagctcgcgatcagccaggtcgcgagcggcggcatcaccagcgtcccgaccccgatcccgctgaccgcgaggcccgatgcaaaaccgcgccgccgaacgaaccagcgctgcacggcgcccaaggtcgggacataggcgcaaccgacgccggcgccgatgccgatgctgtaggcggcgtagacctgaaggatggtctgcgcctgtccggcgagcaccatgccgaggccgacgagggtcattccgaggaccgcgagcctgcgtgcgccccagcgatcggcaagcgcaccggagacgatgccgagaccaaaatacaggaagcccgcgaaggagaacaccagcgacaccgcgccgcgtgaggcgccgaactcccgttgcaaggactcgacaaaggacgagaacgtgtaggcgctgccgaagccgatgaaggtcacgacgaaagccgccgcgacgacaatccagccgtagaacggctttgctcgctgataaccggcgtgcatgacggcgtccctcacgatcgttctccctgcggcgcgcgaccgccagccttggccggcgggtaaagcagcatctgcgtgcaacgaaacagcgcgatggtcttgccggtcgactcgctgcggatttcggcatcccacacctgggtggtgcggccggcgtgaacgaggcgcgcgtcgcagctcacgccgccttcgcgcgctgcgccgatgaagttcgtcttcaactctccggtggcgaagccgatcgcgccctccggtaaggaggcgaggcagccgaacccgcatgcagtgtccgccaacgcgacgatgcttgcgccatgcagcagcccgtgcggcgagaagtgcttcgctgagatctcgaagcgaccgctgatgtggccgcgtccggcattgagccatcggaagtcgagcaggccgggcaggctgccggattgcgattcgttgatgcgatcgacgagttggttgggatggccgtctgcagcgacctcgtgcagagcgagtgtgtttgggacgtcaatcatgtcctggttccatcagtcctggcttcatcaaaggaaccgaaagcagctggcgaacgccggaacgaaagattagatgatctaatcttattggttcgactttctctgcgttgacgcggctttcagcgttaagatagctgatagagcgcctgggacgtcggattggcaaaccagatttgctacgcaattgagattagaagatctaaatcatggaaaaccggcttccgcccctgaacgcgctcaaagcattcgaatccgccgcccgccatctctcggtgaagctcgcggccgaggagctgtacgtgacgccgggcgcggtcagccagatgctcaagacgctggaggcgcatctcggcgtcaagctgttcgagcgggtgccgcgcggcatctatctcaccgacgccggacgcgactatctgccgtcgatccgcaatgcgtttcgccagatcgcggaggcatcgcgccgcgtcgctgcatccgttgatgtcggcacgctgacggtgagcgtcacgccgttctttgcgtcggcctggttggtgccgcgcatgacgtcgtttcagaacacccatcccgagatcgatctgcagatcgtcaccagcaacacgctgatcgatttctcgcgcagcggcatcgacgtcgcggtgcgccacggcctcggccgctatccggggctgcgcagcgaccgcgtcgtgacagtcgagatggtggtggtggccgcgccgtcgctggttgcgcgtctcggccggccggcatctcccggcgacctcgcgacctggccgcaggtgcatgacgccgatcgcaagggctggagcctgtggtttcaggccaacggcatcgcggaggtgcgcgcgccgcgcggaccgtcgttcgatgacagcagtctgctgctgaaggccgtgctgaccgggcagggcgctgggctgctgccggcggcgatggtcgcaagcgagatcgagagcggagaactggtccagctgctggagaccgcacatctggaagagttcgcgtattatctcctctgccccgacaacaggcagtcgcttccgaagatcacggcattcagggaatggatcctggggccggcggcgcagtcggtgcctgcggagcgctagttcttcgcctcgacgacttaccgatagaaagcgttcggcggcacgccaaaatgccggcggaacatcgcggtgaaggcgctctggctggcatagccggcatcgagcgcgacatcgaccacccgcgcgccgcgcgcgaggcgttcgagcgcgaacagcagacgcgcctgctgacgccattcgccgaacgtcatgccggtttccctggcgaacagacgatggatcgtcttcgacgtcaacctcaagcggtttgcccactgctcggcggtggaggcatcgtccgggcggctcaccagcgtcgcgcagatccgcgcgagcctttggtcgcgcggcatcggcagatgcaacggcagcacatcgacctcgcgcaactggtcgagcagcacgtgcatcaggcgctcgtccgaggtcgcaggcgcgtagtccagcggcacgcgcatcgcggcgacgaacaattcgcgcagcagcggcgagaccgtgaacacgcagctggtctgcggtagatcgggagccgcgccggcatcgacgaacacggtgcggatcttgaccgcgccgcacatgcggacctcgtgctcgagtcctgcgaccagccacaccgcacgattgggcggcaccacccaggtgccctcggcacagcgcacgatcatcacgccctcgatcgcgtagagcagctggccgcgcggatgcgcgtgcaggccggtcgacgcgccgctcggatagtcgatctccatcgccgccatcggccgcgccgtggcgtgatagtcgaggtgccgcgtgatcagctcgtccaacacttcctcatttcatgtcccaatctcgctaggtgacgtcactctagcgtgagacggacgttggcgcgacaagtagttgctggtgggtctttcaccaacgcgctgccaaggtcatgttcaagcagaaagccgcacttctctatcccttcgttgccatcgtcctgtgggcgggcaacgtcatcgtctcccgtctctcggcgcacacgatcggtccgcaggcgatcaccttctatcgtctgctggtcgcggtcctgctgatgtctccgttcgtggcgcacggagcctggcgcaatcgtctcgcgatctggccgcatctcgggccactcgcgatcctcggcttcctggcgatgtgcctgttccagagcctgtcgtacctcgcggccgagaccacgaccgcgaccaacatggcggtgttcacagccttgacgccgctcctgaccgttggcctcagtgccgcgctgctcggcgagcagccgacgctcggcatgatctgcggcgcgccgctgtcgtttgccggcctcgtctatctcgtcagcggcggcgacttgtcttcgctgttgcagaacggcgtgcatgcgggcgacgcgttgatgctgctcgccgcgatcgtctacgcgttgtacggcgtgctgctgaagcgctggaatctgccgatcaccgggtggcagtcgacctacatgcaggcgctgtgtgcgctggcggtgatgtttcccgcatttctcgcaacgccggcgccgctgcggcaggtcaacgccgcaacgctgccgctgatcatctatgccggcgcgctggcctcggtggtgctgccgttcctgtggatccgcggtgtcgcgcagctcggcccgaaccgctgcgcgatcttcatgaacctgttgccggtgctgaccgccgcggccgcgatcgtgatgctgggcgagccggtgaagccattccatgtcatcggcggcggcctcgcgctactcggcgtcgcttgcgcacaggcctttccgcggccgctgcgcgcggcgcggcaagggctggggcctctcgggcactcgtgagggacggaatggtgtcgttgaaggtcaccattcccgcgatcagcgatcaaggtcgggtgctcgatcaaggtcgggtgcttctcgacccgtcttgatcatgccggcgccggcagcagtctcgtctcgctcggcggcaacaggtcaatcgcgcgctcggctcgcgaggtgaaatagtcccaggccttctcgtgcccgaaataaacgaacggaccaagtatgaagccgctggccgacaggatcgtcgcttccgtgatgttccgtaccaccacatagttggtggtgaagtcgaccacggttgcgatcgtgcggtaggtgatggtcttggcgagggcgcggctgatcgtgacgctgccgtcggctgattgagcgtcctctgccggcggtgcaagcgcgcgcagggcgaccggggtatcagacgatctgaagtagttccaggcggcttcgtgggccagatagaacagagggccggcgaccaggttgaaggatgacagaccggccgcggtggcgagttcaccgatcaccagatagttcgtggtgaagtcgaggctggtgacgatgacgcggaatgtgatggtcttggcgacggtgcgcccaagcgcgagcttcggcagcagcgtcaacggcagcttgaccgggagctggttcagcaaggacgcggagcgcgcagaattttgacgcgcggtcgcaaccgattttcgattgcggcgacgcaagccgggcagaatgttgggagcgagcatggctgcgccgccaatcaggaggccaggaaccagcgcgacctcgatcagggccgcgcccacaatgactgcaacccctatcgtcacgtattgcttcatcgcctgaccctcggtggcccagattggcgacgaggatagccgtgttgcgtataagaaaaatgtcacattccggcgtcgcggcccggcggtctcgccgttttgatcgcatgcgagaggccacggcagaatagagcgctgggttcagtgatcacctgttcgatgaagcggagtgatcccgatgcgtgctggcttgcgttcttccttggccttgacgttgccccttgtgattctgtggactgcggttgccgatgccgcgacggcacatcaccgccgcgtacgaccgcacctcatcatccgcccaagtgaacaggtggctcctccgacctggtacaggtatccgggcttcgggccgatcccgccgggcgagaacagaaatctcgatccgtcgacgcgcggcggcggctgaggtcgatcaggggcgcgccgaatgctgtccggcggcgtcttcgattcgatcgggtggttggccaggggaggccaaggtcttgagcgtggcggagagggagggattcgaaccctcgatacagcttgagaccgtatgacgctttagcaaagcgttgccttcagccactcggccacctctccggtggcgccgatatgcccgactggacgctgagccgcaagcggcagattcagattgcgacaaggtgatttggtggcagctccacggctggccgcctcgggatggccgtcgagcctttatatagggcgccgattggggagctcgggtcagcgatagcgcagaaaaaccaagctaaaacaatggcttgaatggatgttgggtggcgatggcaagtcgcctgtcgcgggcctgttgaaaaccggtcgcgccggctcactccgcgctggtgccgcggtgcaggtcggcctcgatctgcaatctggtgccgccgccgaagcgggcgcggtagacctgcaggttctccatgatccgctggacgtagttccgcgtctccgagaacggaatcagctcgacccagtcgaccgcgtcgaccttggggtcgcgcggatcgccgtagcgctcgatccacttcttcacgctgccccggccggcattgtaggcggcgaaggtcaggatgtaggagccgcgatagtcctcgagcaggccgccgagctcggccgcgccgagcatcgcattgtagaccggatcggtcttcatccggttgaggtcgaagccgatgccggcgcgcttgcagacatagcgtccggcgtccggcgtcacctgcatcaggccataggcctgcgccggcgacaccacggcgggattgaacgcgctctcctggcgcgcaatcgcgtagacgacgctctgttcgacctcgggcccgacctggcggaacgacgggatgccgttcaccggataggcgtagtggtcgaacggcagtccgcggttgagtgccgacttgcccatcagcagcatgccgcgggcgtcgccattgcgcgcggtcagctcgccgaggccggccagcgcttccggatcgccattgtcgcccatgtcgctaaagatcggaatcgcgagctcgcgcgcgtcgatttcgtagagcagcccgactgcgcgcacgatctccagccgatcggcaccgcggccgcgcggcgcgctgttcagctcgatctgcggcaagccgagttttgcgcgcgcgagctgaccgtaatagctggtcgactgctcggccgcgcgtgcataggcggcgcgcgcctcctggccgcggccggcggcttccgcggcgcggccctgccaatagccggcacgcgccagcgcagtcgggttggcgctgccgacgccgatccgcgcgaagtgctgggcggcgagggagggatcgtcgagaaagcgcagcgcgatccagcctgcggtgaattcctgctcggtcttgtagatgtcgcgggcgggcagtgccgcgtcgcgcgcgatcagataggcggtgcgaaactcgttgacgtcgatcatcttgcgcgccagcaggcggcgctcgacccaccattcgtcgacgttgtagagacgcgaggcctccttcggtgcgctcagcatcagccgggcggcctccgtgaatttctcttcgcggcggagcagctggatcttggcgaacagatagccggtgtcgccggacaggtcactcgggaccgcttccagcagcgcacgcaggttcgagcccttgcggttggccgcgatgcgcgccttggcaagtgccagatagccggagccgagacgcttggccgcgcggatgccggcggcctcgttgtcggtgccgtagagcatggtgtccatgcgcgccttgtggtcgccggcggtcaggaacgagccgaacagatcgagcgcggtggtttcggtgtcctcgctcatcgggtcgttgcgccaggcttcgcgcaccaaacgttcggcattgccgcggtcaccgcggccgatcatcaccttggcgagtgcgagccggcccttggccgagaccggcgattcattctggaaccaggcccagactgtggagtcgtcgcgatggtcgtcccatagcgatgcttcgatgcggcggcgcaggaaggtctgtgacggccagctcggattggcgtcaaggaaggcgcggtagcgctcgaccgaagcgccattgtcctcgctgcgcaggatcagccattctgcaagcttgcgcgccaccggatcggagatcgaggcttcagcctcggtggcatcagaaggcctgcgcttgcgcagcaactcgacgacgctggcaagcgcgtccttgtccgactgcgacgtcgatgatgttgcagccaccgcggcaggcagcaccggcttgcgcacgatcggcgcggcatgctggcgggttgccggaaccagcgcgggggcggcggcgcgggcaggcgccggcttgttcgtcggcagacttcctgttgcggccggggaggcgggcttggatgccgtggtcttggactcggtcgtcttggacgcagtggccttcgacgtcgtgcccttggcttcggtggtcttcgcggccgttgccttgggagcgtcggtcttggcagaagcggccttggcgccgtcggtcttgaccgcactcgacctggaggaggtcgtctttgccgcgtcggtatgcttggcttcgctcttcttgctttcgctcttcttggcttcgccgttcttggctgctgccggctttgagccagccaccttggaacccgtgctccttgcagccgtatcctgagcagccggctttgcggccggaacatcctcggcggcctgaacatcgggcgtgatggcggcaaggccgaccaccagcgccaggctcgtcgccagcgccgtcgaccgcaatgtgcctgcgcgaacggaacggatcacagaagtcctctgcggccccgaatcaaccggtcgtttgggccatgggttcttatttgattgaaaacgtagacaaaatactaagaagcctgccggtgcggctgtttgcgccagcacaacggcaaaatcgcggctggacgcggtattgcgcgccgcagattaccgttgggaataggtacggtacggccctttcgcctgtcggccagacccgatatgaattgcccttcatggcgtttcgcatcaaccgggtgccggttgcacggacgtgaagcacgacaacaacaagggtccgtcgacctagcctttagcctgaagcgtttggaggaagtccatggcagccaagacaaaattccggggatcattcactgccttggtgacgcccttcaaaaacggctcggtcgatgaggcggcgttccgcggcctcgtgaactggcagatcgccgagggtacgcacggcctggtgccggtcggcaccacgggtgagagcccgacgctgagccatgacgagcacaagcgcgtggtcgagtggtgcatcgaggaggccaagggccgggtgcccgtgatcgccggtgccggctcgaattcgaccaaggaggcgatcgagctcgccgagcacgccgagaaggccggcgccaacgccgtgctggtggtgacgccgtactacaacaagccaacccaggaaggcatgtaccagcacttcaaggcgatcaacgatgcgatcgggattccgatcatcatctacaacatcccgccgcgctcggtgatcgacatgtcggtcgacaccatgaagcggctgttcgagctgaagaacatcgccggcgtcaaggacgcgaccgccagcatggtgcgtgtgtcgcagcagcgcgcggcgatgggcgaggacttcaaccagctgtccggcgaggacgccaccatcatcggctacatggcgcatggcggccatggctgcatctcggtcacctcgaacgtcgcgccgcggctgtgctccgagttccagaccgcctggcagaagggcgatgtcaccaccgcgttgaagatccatgacaagctgatgccgctgcacaccaacctgttcatcgagagcaatcccgcgccggtgaagtatgcgatgtcgctgctcggcaagctggacgagaagctgcgcctgccgatggtgccggtctctgaatcgacccgccaggccgtccgcagcgccatggtgcatgccggcctgatcaactgaaccgggaccgtgccgccgtgaatgatgccgtacgcaatgtcgaacagaaggggatggggatgctgaaggaattccgcgaattcgccatgaagggcaatgtcgtcgacctcgccgtcggcgtcatcatcggtgcagccttcggcgcgatcgtcacctcgctggtgggcgacatcatcatgccgatcatcggcgcgatcaccggtggtctcgacttctccaactacttcaccgggctttccaaggcggtcaccgcaaccaacctggccgacgccaagaagcagggcgcggtgctggcctggggcaacttcctgacgctgacgctgaacttcctgatcatcgccttcgtcctgttcctggtcattcgcgccatgaaccagttcaagcgcaaggatgaggccaagcccgccgaaccgccgaagccgtccgacgaggtcgtgctgctgacggaaatccgcgacctcctcaagaagagctaaagtggccgacaagaacgaacgcccgatcaaggttgtcgccgaaaaccgaaaggcccgcttcaactacgccatcgaggacacgatcgaggccggcatctcgctgaccggcaccgaggtgaagtcgatccgcagcggcaagagcacgatcgcggaatcctatgcggattccaagaacggcgagctgtggctgatcaacgccaacatcccggaatatctccaggccaaccgcttcaaccacgagccgaagcggccgcgaaagctgctgctgcatcgcaagcagatcaacaagctgctcggggcggtcgaccgcgagggcatgacgctcattccgctaaaactgtacttcaatgagcgcggccgtgccaaactgctgctcgcgatcgccaagggcaagaagctgcacgacaagcgcgagagcgagaagaagcgcgactggtcccgcgaaaagggccgcttgttgcgggcgcgggggtagcgttcaagtcgtcatttcggatgacgacggatggagatgggccgatgagccaaggcagcctcaccgacgttgactggagcaagatcccggcgccgaaggacgatggcggcgcggcgcacctctcgggcatgacgatcccgcccgtgaccttgcgggccaccaacgacacgtcggtgacgctgtcggcgctcgagggtcgcaccgtggtgttcgcctatccgcgaaccggcgagcccggcaagatcgggctggtcgacgattgggacatgatcccgggtgcgcgcggctgtacgccgcagacctgcgccttccgcgacctgttcgccgagctgaaggccgccggtgccgcgcaggtgttcgggctgtcgacgcaaagcaatgactatcagatcgagatggcgtcgcgcctgcatttgccgttcccggtgctgtcggacgaggcgctcgaactcacccacgcgctgaggttgccgacgatgtcggtggcgggcctgaccctgatcaagcggctggcgcttgtgatcgacgacgcccgcatcacgcacgtgttctatccggtgttcccacccgaccggaacgccggcgacgtgctggaatggctgaaggacaatccgcggaagaactagctggagcagtcgtcgcagggagcgctgctaaaatatcgaaaacaaccccatgcaaagcagccggcagcggccggcgttcgaccaagcaacttgacacgtcgggcaactcaggggtacttttctagtattccgaaatttcgctgatgtcctcagccccgcaggccgtcgcttatggcatttgcggggttctgcaactggcgtcaggacaatccgatcgttcgttagaacacgtcgatcgtcgggaagcgggggtcgccggttaggcaatcccagagatagaccgccagaccgacgtcgccggtccataacgaatagcggccgcgtccgagctccgaccttgcttcgcggcattgggcgatggccgtcatcgcgaacgatcgtgcccgttcaagccaatgggcgtcgccgatccggcggaacagcttcaggaaggcgtagccgttgccgcctgtgccgtgacagaggttggagcccttgctgagcgggccggcgttccaggtaaagtcgccgccctgccggagcaactcgtccagctcacgcgattgcaagggcgcgtcggcaaacgtcgtgaccatgcctggtgcgccgtggcagtgctggcacagacgcgcggtgccgccggcgacggccggccagttgatgcctgcggcggttcgccacgcgttccgtgtcagggtctgcggcatgatcgtggtcagcgacgcgcgctgctcttcttccagccagctccagccgcgcagcaacgggatcatgttcccggcatagccgtgcacgggaccaagccaacggtgatgatgaccgtacagatcctgtcgccacagcggtcccagctcggtgtcttccagctcggacaagagccgagccgcctgcatcttgaacagggcgcgccaacgctcttcaccggtcatctcgtgcatgtggatgcaagccagcattgagccgggcatgccccacatcagttcgcggattgggagcgaactgtttgcttcggcgcggtcatagatttgagaggcgactgcagcgtcgggttgcagccgcatcacgaggaggagactgccaagatcgccgaacaggagtgatccgtgtgccgagtaatcccgttctgcgaactcggccctgttgttctcgatcagccgcggcaggatcggactgaaatcgaatgaggccttcgtcgccccaacccacttgagatagttgagcgcccagatcatccctgtggcaccgaagtagaagctcgcggtgccgtccggcaagccgtcatcacttgggtgtgccggccagaagtccacggggtcaaagccggcgagcgcgtcggcaacgatctccccgattgccgtcgtcacctcgtccgcgtcccagtcgataggacgcaacggcacgtatggattgtccggcatggtgctcccacgcttcgtcaggtctccagatccctgcgcactgtcgcgaacaccttgcggaacatgtcggtcgtcagcacgcctgtgttcgtgttgtagcgcgagcagtggtagctgtcgtagagcttgtacttgccgacgctatgcacggcgccgtgcacaaacggcgccgcggccaggcgaacgcccaatgccttcagggtcgattcgtgggcgatgcgtccgagcagcacgatggcccacaccttcggcatcgcagcgatggtggcgctgaggaactgccggcaggtgttgatctcggccggcagcggcttgttctgcggcggcacacagcgcaccgcgttgctgatccggctgtcgaccagcgtcaggccatcgtccggccgcgcctgatagacgccgctggcgaagccatattcgagcagggtcgcatagagcaggtccccggcgtagtcgccggtgaagggacggccggtccggttggcgccctgcataccgggcgcaaggccgacgatcagcaaccgcgcgttcggatcgccgaacgactccaccggggagttgaaccagtccgggttgcgcgcgcgggcttctgcgcggaagttggccagccttggacagagctggcagttgctgtcgggacgctgcggtgcggcgacgagattactcgtcgaaatcgtcatcggctccccgtggggccatcgtggtcgcgcgctgcaggaattgcggggagtggtgacgcggttcgcgcggcgccggccgttcggacggatcgcggccaagcttggattgcagctcgaccaggtcggtgaagacgtcggcctggcggcgcagctcgtcggcgatcatcggcggctggctggcaatcgtggagatcacggtgacgcgaacgccacgacgctgcacggcctcgaccagcgagcggaaatcgccgtcgccggaaaacagaatcatctgatcgatgtgctcggcaagttccatggcatcgacggcgagctcgatgtccatattgcccttcaccttgcggcggccgctggcgtcgatgaattccttggtcgccttggtgacgacggtgtagccgttgtagtcgagccagtcgatcaacggacggatcgacgaatactcctgatcctcgatgatcgccgtgtagtagaatgctcgcagcagtgttcctcggctctggaattccttgaggaggcgtttgtagtcgatgtcgaagccgagggtctttgcggttgcataaagattggctccgtcgatgaagagcgcgatcttgttggaaacaggtgacgacatcaaagtgttctcgcgtagttgttagtgttcttagcgcaacgacgaccgaccgcgcgcaatttccagcgttgctgcctaaagttcagtgaatctttccctacgacaatcaccaccgcaattatggtgaggcgagggcaaaaagcctagacttttgacattgcaatgaagagatttacttgtctgggacggcaacctagccatgtcgtcagacgctccggcccttctggccccggcggaccgggttatcagagcctgttgggaaggcaaatcacaaattttaccttgcgaaaccgggactagccctataactaaccctcataacctacatgttcggtcccttttaccacggagcgcctcgagatggctcgcgtcaccgtcgaagattgcattgataaggtcgacaatcgcttcgacctcgtcctgttggctgcgcatcgcgcccggatgatctcgtcggggtcgcaactcacggttgatcgcgacaacgacaagaacccggtcgtttcgttgcgcgagatcgccgattcgacgatctcgccggaagacctcaaggaggaactggtacactccctgcagaagttcgtcgaggtggacgagcccgagccggacactgtgccgctgatcggttccgctggtgccagcgttgacgccgacgacaccgaggtcgcggtcgagcgcatgaccgaggaagagctgctgaagggcctcgaaggcctcgctcccccggaagagcagcccgaggaagacgagtaagcccgtcgttcagctgcctcgtttggaacggatttgaaaaaggcccggacattgctccgggcctttgcttttgttgacaatttcgctgttacggtgcgtcctatgcgggcgcgggaaattgaatggtcccagggcccgcgcggggtgcagcttcgttcgaaagcgcactagattgaggaagggacgcttcggtcccgcgcgagaggcagcgagttcatggcgtatcgacgccgcagttccatccagatgcaggctgcaaccgaaacggttgcggtggcgccggcgtcgtccgcggcggagcggccggccaggccgcggacgcgcatgatgcgacaatatgaccttgtcgagcgcgtccgttcctacaaccccgacaccaacgaagacctgctcaaccgcgcctatgtctacgccatgaaggcgcacggcacccagacgcgtgcctccggcgatccctatttctcgcatccgctcgaggtcgccgcgatcctcaccaacctcaagctcgacgacgccacgatcgtggcggcgctgctgcacgacacgatcgaggacaccgaggcgacgcgggccgagatcgaccatgtgttcggccacgagatcggcgcgctggtcgaaggcctcaccaagctgaagcggctggaactcgtgtcgcgcgaggccaagcaggccgagaatttgcgcaagctgctgctggcgatcgccgacgacgtccgcgtgctcttgatcaagctcgcagatcgcctgcacaacatgcggaccatggagttcatgccgccggcctcgcggcgccgcatcgccgatgagacgctggacatctatgcgccgctggccggccgcatgggtatgcaggagatgcgcgaagagctcgaggacctgtcgttcttcgtgctcgatcccgaggcctatgccgtggtccagcagcggctcgattccctggccgagcgcaaccgcaatctgatcggcgagatcgaaacccagctctccaagaacctgcagaagaacggcatcaccgcgcgggtgttcggtcgccgcaagcagccgttttcgatctggaccaagatggagcgcaagtcggtcggcttcgagcagctgtccgacatctacggcttccgcgtcatcctcgacgacgtcggcgcctgctaccgcgcgctcggcatcgtgcacaccacctggccggtggtgccgggccgcttcaaggactacatctcgaccccgaagcagaacgactaccgctcgatccacaccacggtgatcggtccgggcaagcaacgcgtcgaattgcagatccgcaccgaggagatgaaccagatcgccgagttcggcatcgccgcgcatgccttctacaaggaaggggccggctcgccgcatgagcggctcaagcacgaatccaacgccttcgcctggctgcgccacaccatcggcatcctctcggagagctccaatccggaagaattcctcgagcacaccaagctcgagctgttccatgaccaggtgttctgcttcaccccgaagggcaagctgatcgcactgccgcgcaacgccaacgtgatcgacttcgcctatgcggtgcacaccgccgtcggcaacagcgcggtcggctgcaagatcaacggcaagttcgcgccgttgtcgtccgagctgcagaacggcgacgaggtcgaggtgctgacctcgaaggcgcagtcggcgccgccatcggcgtgggaggcgctcgcccgcaccggcaaggcgcgcgccgcgatccggcgtgccacccgcgatgccgtgcgcgaccagtatgccggcctcggccgccgaatcgtcgaccgcctgtttgcccgcgccaagatcgaatatgccgacgacaaattgaagggcgcgttgccgcggctcgcgcgcacctcgatcgaggaggtgatggcctcggttggacgcggcgagatcaaggcttccgatgtcgcgcgcgcgatgtatcccgactacaaggaagagcggctggtgcgctacggcgccaagaaggggcttgccgccaagctgaagacacagaccccgccgcatccggcgcgcgccgcctcggtgattccggtgcgcggcatcaactccgacctgccggtgaagttcgcgccgaacggcggcgcggtgccgggcgaccgcatcgtcggcatcgtcacgccgggcgaggggatcacgatctatccgatccagtcgccggcgctgaaggatttcgaggaggagccggagcgctggctcgacgtgcgctgggacatcgacgagaccatgccgcagcgcttcccggcgcggatcctggtgcacaatgtcaacgaacccggcagcctcgcccagatcgcgaccgtgatcgccgagcatgacggcaatatcgacaacatccacatgtcgcgtcaatcgcccgacttcacggagctgaccatcgatcttgaggtctatgacctcaagcatctcagcgctatcatcgcgcagttgcgcgccaaggccgtcgttgcacgggtcgagcgcgtcaatgggtaaggatcgatgcgcgcggcgtcggcgggcggaagcgaccccgtcctgcaaacggcgacgcccgtgcccgacaggctcggactacaggtcagagacatgttaaaggctgctccgctccgtctcggtatcaacgtcgatcacgtcgcgaccctgcgcaatgcgcggggcggggcgcggcccgacccggtgcggctggcgcttgctgcgatcgcggccggcgccgatggcatcaccgcgcatctgcgcgaggatcgccgccatatccgtgacgaagacatggcgcggctcaaggccgagatatcgaggccgctgaatttcgagatggcggcgaccgacgacatgctgcggatctcgctcgccaccaagcctcacgcggtctgcctggtaccggaacggcgccaggagctcaccaccgaaggcggcctcgacgtggtcggccagcacaatgcgctggccccgttcatcgcgcggctcaatgatgccggcatccgggtctcgctgttcattgcggccgatcccaggcagatcgagatggccgcgaagctgaaggcacccgtgatcgagatccacaccggcggctggtgcgacgccgtcgtcgatggccacaaggacaaggcggacgccgaatggaagcgcatcgtcgacggcgcaaggctcgcgcaggcggccgggctcgaggtccatgccggccacgggctcgactatgagaccgcggagacgatctcggcgctgccggaaatccgcgagctcaacatcggctatttcatgatgggcgaggcgctgttcgtcggcatcgccgggacggtgcgcgagatgcgcgcggcgatggaccgcggccgcgccaaggcgcagggtgtggccggcgcatgatcatcggcatcggctccgacctgatcgacatcacccgggtcgccaaggtgatcgagcgccatggcgagcgcttcctcgatcgcatcttcaccgacgccgaacgggccaaggcgatgcgccgcgccaacaacgagaagatggtggtcgcaacctacgccaagcgcttcgccgccaaggaagcgtgctccaaggcgctcggcaccggtatccggcgcggggtgtggtggaaggacatgggggtggtgaacctgcccggcgggcggccgtcgatgcggctgaccggcggggcgctggccaggctccaggaactgacgcccgagggcatgcaggcgcagatcgacctgtcgattacggacgattggccgctggcgcaggccttcgtcataatttcggcggttgcccccgccagatgagcgcgcggcgccggaatctgccggaaaacttcagcaaactaaaaaatcattgacatttcaatgaattgcgaagttttgaggcgacgattgattgcgcctccgcaaacaaccgtctaaaacgccgcaggctaaatcgagcgagacgcggattccgggtttaggccggagtttgccctcaagatcagaatcaaggccattttcctcacgcgagggcctgacgcttcgcgcgaagagaacgttctgccaccgcgtggacatcggcccacgggaattgggaaagcaatgagcgtgaccaccgggaccaaaactgaaagcggcttcggcgagaccatccgcgtcgtcatccatgcccttctgatcgcgctcgtcatccgcaccttcctgttccagccgttcaacatcccttcggggtcgatgaaggcgacgcttctggtgggcgactatctgttcgtctcgaaatattcctacggctacagccactattcgatcccgttctcgccgaacatcttctcgggccgtatcttcggctcggagccgaaccgcggcgacatcgtggtgtttcggctgccgcgggatgactccaccgactacatcaaacgtgtcgtcggcctgccgggcgaccgcatcgaggtcaagaacgggctgctctacatcaacgatgagccgatcaagcgcgagcggctgagcgatttcgtcggcgaggacccctgcggctcggcggatgccactgcccgggtcaagcgctggaaggaaacgctgccgaacggcgtcagctatgagacgctggattgcaccgacaacagctatatggacaacaccatcgtctacaccgttccgcccggacatttcttcatgatgggcgacaaccgcgacaactcgaccgacagccgcttcctgtcgcaggtcggctacgtgccgttcgagaacatcatcgggcgcgcccagatgatcttcttctcgatcgccgagggtgagcaggcctggatggtctggcgctggccgttcgcggtgcggtggaatcgcctattctccatcgtgcgatgaacgacgataccgcagccatcaacgatcaagcgccgaccggcgagccgagccagacgtctgccgccgagagcacggccgcgccgaagaagcgacgcagcaaggcggccaaggctgccgaagcgaaggccgcgatcgcaggcaccgaagcgcggatcggctatacgttcgccgacgctgcgctgctgaccaccgcgttcacccacgtctccgcgcttaagccggccactcgcaaccgcgccgacagctaccagcggctggaattcctcggcgatcacgtgctcgggctgatcgtctcggacatgttgttccgggcgtttccgaaggccgatgagggcgaactgtcgaagcggctcgccgacctcgtgcgcaaggagagctgcgccgacgtcgccaagtcgctcgggctgctcgacgacatcaagctcggtatggtgaaggcggtcgagggcgcgcggctgcgcaaatccgtgctcggcgacatctgcgaggcggtgatcggcgcgatcttcctcgacggcggctacgaggccgcgcgccagttcgtcgagcgcaactggaccgagcggatgcacaagctgcgccggccgttgcgcgatcccaagaccgtgttgcaggaatgggcgcaaggcaagggattgccgacgccggtctatcgcgaggtcgaacgcaccggcccgcaccatgatccacaattccgcgttgcggttgatctgccgggcctcgcctccgccgagggcctcggcggcaacaagcgcgcggcagagaaggcagcagcatccgcgatgatcgagcgtgaaggcgtcggtaccaatgactgacgagaccaaagggcagggagacgcgacgcgctgtggcttcgtcgcgctgatcggtgcacccaatgtcggcaagtcgacgctggtcaacgcgctggtgggctccaaggtcaccatcgtgtcgcgcaaggtgcagaccacgcgcgcgctgatccgcggcatcgtgatcgagggcaacgcgcagatcatcctggtcgatacgcccggcatcttcgcgccgcggcgccggctcgaccgcgccatggtctcgaccgcctggagcggcgcccacgacgccgatctggtctgcgtgctgctcgatgccaagtcgggcatcgacgaagaggccaacgcgatcctggccaagctcgagaccgtcgcgcacccgaagatcctggtgctgaacaaggtcgacctggttcagcgcgagaagctcctggcgctggcgcaggccgccaatgagcggatgcgcttcgagcacaccttcatgatctcggcgctgtcgggcgacggcgtcgacgatctgcgccaggcgctggccaagctggtgcctgcgggaccgttcctctatcccgaagaccagatgtcggatgcgccgatgcggcatctggcggccgagatcacacgcgagaagatctacagccatctgcatcaggaattgccgtaccagtcgacggtcgagaccgacagctggaccgaccgcaaggacaagtcgatccggatcgagcagacgatctttgtcgagcgcgagagccagcgcaagatcgtgctcggcaagggcggcgccaccatcaagtcgatcggcgcgcaggctcgcgccgagatcgccgagatcatgggcgtgccggtgcatctgttcctgttcgtcaaggtgcgcgagaactggggcgacgatcccgaccgttacaaggaaatggggctggatttccccgaggaataagaccggcgttggcgatgaacgtgccccgaaacgtgctgtggtttgaggtgctgctgtatgcgacgctgctccttgacgcgctgtcggcggcgttcagcgatcgcactccgaaggaagagttgacatcgcagacggtgacctcactgcctttgctcgatgccggctttctgctgttgttcaccttttttgtcttccttgcggcgcgataccgcaagaactggccgcgctgggttttgctggtcgcgctggtgttgtcggcggtcggcctgttgcaggacatcgtcacgaacggcgtcgaaatcgacaacgggatccaggtcgtctcccacgccttggcggcgctcggactgtattattccttcaccggtgacgcacagggctggttcaacgcgtagggggcagacctcacgatcggtacgcgtggaagatgacgatcccgctcacgacgataacccagaagacgaagccgacgatgacgccgagcgaagctgacaagatcatccggccctgaggcgagcgactgattccgggagtacctgtccagccgatcctgccgtcggggcgttcgatggttaccttgccaagcgttgcggcaaacaccactgcaaacgcggtgaagaagcagagcacaggaagcatttcccagaccgcccagaatacaagttcgagcacgccggcgatcaagtcgccgatgaggctagccattacgatcgtcccgcataggtcgacaacttcagtatcggaccggttggcggtatagttagcacatggaatggaccgacgaaggcatcgtgctgggggtgcggcggcatggcgaatcctccgccatcgtcgagctcctgacccgcgagcacggccgccatctcggcctggtgcgcggcggtgccggctcgcggatgcgcccgctgctgcagcccggcaacagcgtcaccgcggtgtggcgggcccggctcgatgagcatctcgggatgtacgcgctggagggcacaaggctgcgggcggcgacgctgctcgcatcgtcgcacgccgtctatggcgtcacgcatctggcggcgctggcccggctgctgccggagcgcgatccgcatgaagacatctacgagatgctgcaagggacgctcgacgatttcgacgacgccggaattgccgccgtgcacctgatccggtttgaattggcgatgctgaccgagctcggcttcgggctcgatctggagaactgcgcggccaccggggagaccaccgacctgatctatgtgtcgccgaaatccggcggcgcggtgtcccgggccgccggcgagccgtggcgcgaccggctgttgccgttgccggcattcctgcgcgaaggcgagggcggcgccaacagctggtcggagcaggacctgcgcgacggctttacgatcaccggcctgttcctgctccgccacgtgctggagccgcgcgggcagggccattccgacgcccgcgacggattcatcaacgccgtgacccggcggcggggccggacggccattccgtagggccgattcgcaacctaaattcgcggtgattcgcggcttgcccgattcaccgccagggtttaacgcctccccatgggaaaacgacagataccgccggaaaagccggccgaaattcacgaggtgccgctgcgtgatgcgctcgaggagcgctatctcgcctatgcgctctcgaccatcatgcatcgcgcgctgccggatgcccgcgacgggttgaagccggtgcaccggcgcatcctctacggcatggacctgctcgggctcgacccgcgcgccgcgttcaagaaatcggccaagatcgtcggcgacgtgatgggctcgttccatccgcacggcgaccaggcgatctatgacgccatggtgcgtctggcgcaggatttctcctcgcgctatccgctggtcgacggccagggcaatttcggcaatatcgacggcgataatccggccgcctaccgctacaccgaagcgcgcatgaccgaagtcgcgcggctattgctcgacggcatcgacgaggacggtgtcgagttccgcctcaattacgacggccagtcgaaagagccggtggtgctgccgggcggcttcccgaacctgctcgccaacggcgcgcagggcatcgcggtcggcatggcgacctcgatcccgccgcacaacgccgccgaactgtgcgacgccgcgctgcacctgatcgagaagcccgacgccaagtcgaaggcgctgctgaaatgggtcaagggcccggacttcccgaccggcggcatcgtcgtcgattccaaggaagcgatcgtcgaggcctacaccaccgggcgcggctcgttccgcacccgctcgcgctggacccaggaggagggcgcgcgcggcacctgggtggtggtcgtcaccgagatcccgtggctggtgcagaagtcgcggatcgtcgagaagatcgccgagctgatcaacgagaagaagctgccgctggtcgccgacgtgcgcgacgaatcggccgaggacgttcggctcgtgatcgagccgaagtcgcgcaccgtcgatccggcgctgatgatggagtcgctgttccggctgaccgagctggaaagcaagatctcgctgaacctcaacgtgctgatcaagggccgcatcccgaaggtggtcggccttgccgagtgcctgcgcgaatggctcgaccatctgcgcgacgtgctgatccgccgctccaactttcgcaagacgcagatcgagcaccggctggaagtgctgggcggccacctcgtcgcctatctgaacctcgacaaggtgatcaagatcatccgtaccgaggacgagccgaagccggtcctgatcaagaccttcaagctcaccgaaatccaggccgacgccatcctcaacatgcggctgcgcaatttgcgccgcctggaagagatggagatccgcaccgaggacaaggatctgcgcaaggagctgaagggcgtcgaggggctactcgcctccgagaccgagcagtgggccaaggtcggcgatcaggtccgcaaggtccgcgacatcttcgggccgaagacgccgctcggcaagcgccgcaccaccttcgacgatgcgcccgagcacgatctcgccgcgatcgaggaagcgctggtcgagcgcgagccgtgcaccgtcgtgatctccgagaagggctgggtgcggacgctgaaggggcatgtcgaggatctctcggggcttgccttcaagaccgacgacaagctcgagcactcgttctttgccgagaccacctcgaagctgctgctgttcgccaccaacggcaagttctactcgctcgacgtcgcaaaactgccgggcggccgcggtcatggcgagccgatccgcatgttcatcgacctcgagcaggacgccgcgatcatctcgctgttcgtcaacaagggcgagcgcaagttcctgatcgcgagcagcgagggccagggcttcgtcgtcaaggaagaggactgcgtcggcaacacccgcaagggcaagcaggtgctcaatgtcgagatgccgaacgaggcccgcgcgatcacgaccgtgctcggcgataccgtcgccgtgatcggcaccaaccacaagatggtgctgttcggtctcgaccaggtgccggagatggcgcgcggccgcggcgtgcggctgcagaaatataccagctcggagctgtccgacgttgcggtgttcgacgccaagaccggcctgacctggaaggactccgccggccgcgagcacagcatgagcatgaaggaactggccgactggcgcggcaaccgcgccgacgccggccggctcgcccacggcctgcccaagtcgaacaagttcaaccgcggtgtggagtagtggaattgtagcccggatggcgcgcagcgaaatccgggctacgcttacgaccagcgcggtgtgatagtatccacatttcgccgcgctataaccgtcgccaacgatcacgggcgacggttgccatggcgcatcatcacgaccacgaccatgaccacagcggtcattctcacaaccagtcccatgctggccactcccacgcgggacattcccatgccgggcacagccatgcgcccgccagtttcggcacggcctttgcgatcggcgcctcgctcaacaccgccttcgtcgttgccgagctgatcttcggctattccgccaactcgctggcgctggtctccgacgcggttcacaatctctccgacgtcatcgcgctgctgttggcctggggcggggcgtggctcgccggccggcgcccgaccgatacccacacctatggctatcgccgcgcctcgatcctggcggcgctgttcaatgccgggctgctgctgatcgcggtcggcggcatcgcggtcgaggcaatcaaccgcttccgcgagccggcggaggtcgcgagctggaccgtggtctgggtcgcggcgctcggcatcctgatcaatggcggcactgcgctcatgttcatgcgcggccgcgacagcgacctcaacgtccgcggcgcctatctgcacatggcggccgatgccggcgtttcgttcggcgtcgtgatcgccgcgctcctgatcatggcgaccggctggcaatggctcgatccggcgatcagcctcgccatcgcggtggtcgtgctgctgagcggctgggagcttgcccgcgacagcgtcaacctcgcgctcgacgcggtgccgaaggggatcgacctcaagcgggtgagggactatctcgccgcgctcgagggcgtcaccgaggtgcacgacctgcacatctgggcgatgagcaccagcgagaccgcgttgaccgcgcatctggtgcggcccggaggacacgacgatgtcttcctgcatcgcgtctgcgccgagctttcgcagcggttcagcatccaccacgcaacgctgcaggtcgagatcagcagcgagacctgccggctggcgcccgcggaaatggtctaggcggcggcgcgcgctcgcattcaattgatcgattgcctcatgccgacctcttccgcggttgcggacgagacggcacattgcggctgcgcgcgcttaagtaaccggctcgatcaacggaggccaacgtgaagaaggcaatcggtcttgcattttcgctgtgggtcgcgggcgcgatgccgtatgcggacgcccagccggcgaaatcaggcgtcgaacggctctacatcctcaactgcggcgagggcgttgccggcgacatttcacgctggtcgcccggcgtcaatgaaggcaagtcgatggacttcgtcgacaattgctatctgatcaagcacgcgcagggctggttcctgtgggacaccggcattcccgacgcggtagccgcgatgccgaacggccttgcaccggccgatcccaaagccgtcgcgtggcaccggccgaagacgctcgccgcgcagctcgaccagctcggcgtgaagccgtcggacatcaaggcgatcgccgtctcgcatacccatcccgatcacatcggcaatgtcgagctgttcccggccgcgatgctgtacgtgcagaaggcggagtatgactggccgggcgtcaacgacgcgccgcgcttcaagcccgagcatccggtcaccaagctcgagggtgatcgcgacgtgttcggcgacggcagcgtcaccattttggcgacgccgggccacacgcccggccaccagtcgctgctggtgaagctgccgaaaagcggcgcggtcgtgctgaccggcgacgccgtccacttcaaggacaattgggacaaccggcgcgtgccgagcctgaacgccagcaaggagcagacgctggcctcgatgcagaagatcgccgacacgctgaccaaggagaaggcgcagctctggatcaaccacgacaaggcgcagcgcgacgggctgaagctgtcgccggagttctacgactgagctgctttggcggcactcgaccagtctcgaaaaatctgcgcggtcgcttcgtccatcggaaagaagctctcgatccgcagttcctgcaacgtgacgtcctgcggcgtccccagcgttgcgattgtcgtgaacagctgcaggcgcgcgtcgcccttgcggaacaacatcggcagcaccggcccggatgttggcggcggcgcggtcaacgcggcctcgacgccgtcataggccagcaggcgcttcagcaggtccgccgtcgctgacgtgccgtcggcggccgcatcggcctcgacgctgcggacgaagtagccggcgacctcggtccagttggtgagccagggccgcagcacgccgggagcgatcagcgcgtcggcgaggttgaccggtgtgcctgataccagcggcccgaccaggaattccaccagccgtaccgcgccggcgttggcaagcagcagattccagtgccggtcgaccacgaccgcagggaatggctcctgctgtgccagaatgaaatccagcgcgtggcggatctgggcgagctcgggcgcggcaaggtcggtttgccgccagaccggcgcgaagccggccgcgaccaacagcgcattctgctggcgcagcggcacgtcgagcgccgcggcaagccggatcaccatgtcgcggctcggcgcggcccggccgagctccaggaagctcagatggcgctgcgaaatgtccgcgcgaccggcgagctcgagctgggagtggcccttgcgctgccgccaccagcgcaggctggctgcaaaatcgcgctgctgcgacatgagtacctgtgaagtagttgccggaacgatttcgctttgcaagatgccacaagcgagtgcgaaacgcatgagggcggaatgggggagtggatcggcgtagcgatggctctggtctcgagctgcctcggcggcacggcagcggcgatcacgcggtatctggccggtaacgccgacccgatcacgcttgcgatcctacgctgggcaatcggcttcctctgcgtgcttcccgctgcggtgttgctcggggcgaaatggccgcggcgcggggattggccggcggtcgcggcgctcggcatcgccttcttcggcgtgttcttcgtgctctacaacatcgcgatgtcctacacgacggcggcacgtgccagcctggcgctggcgacgttgccgctctccaccatggtggtcggcgccgtgctcggcatcgagccgctgacgatgcgcaaatcggccggggtctcgattgcggtgctcggcgtcgccgcggcgctcgcatccgggctgtcggcggcgccaccgggcgcatggcgcggcgagctgatcatggccgccgccgtgctctgcatggcgttttacaacgtgctgtcgcgaccgttgatccgccgctccagcgcgctcggcttccttgccgtcggcatgggcgcgggtgcggctgcgctggtggcggttggggcgttcagcggcagcctggcgacgctccgcgcgttcggcgcatcgcaatggatcgccgggctctatcttggaattgccggtggtgcgctggccttcatcctgtgggtgctggcgctcgagcgggcctcaccgacccgcgtcgccaacaccatgacggtcaacccgatcgcggccgggcttttggccaagcaactggtcggcgagccgatcacggtcagtctggtcgccggcctgatcgcggtctgcgccggaatctggatcgcgacgtcggaggccaagccggcctgatcagctgtgcggggcggacggcgtggtcaccggcggagcggggggaacgtgtttcggtttcagcgtgccggcatagaacgacagggcgtagaccaggatgatgccgccgagatagaccccataggattgcggcggggtgatcgcccatagcaggaggcgtcggatcggattttgcgggccggcatcgttgtccatgcgctccttgtgcgcgaaggccaaggcaaagtgaagcggaatcgccgactcgggctgcgctgttccctgcgaaatggtgaggcgggctgccttgcaatgccgcgttggcatccgcatctgtcgcgcgacgaccagcccttcctcccgcaccaattgcccggcataatccattgatggaactgacgccccgtttgcgcctcatgaattggctggtccgccagggtctgacgggcttgccggagaacgacctgctgcgcggcttctgcgagcgctgtcgggccgccggcatgccgctgtcgcgggccatcgtcttcatcgacaccctgcatccgatcttcgaggggcgcggcttccgctggaacgacggcgagagcaacgaggccgacatcttcgaatatggctcgaccagtaccggcgaagccggccagaagtggcggcagtcggcgttccaccacatgctcgaaaacggccatgacgagatggtgatcgacctcgccgcgccacacgatttctcgatgatcggcgacctcgccgagaagggccacaagcatttcgcggcgttcgtgcaccgcttcggcgaggccggcacgatcggcgagatggactgcttctattcctactacacgacccggcattcggacggtttcggtgagaaccacatggccgcgctgcgcgacctggtgccggtgctcgggctcgcgatcaaatcggcggcgcaggtcgagatcgcccgcacgctcggtcgggtctatctcggccgcgagacggcggagcaggtgctgcgcggacgcatgcagcgcggcatcaccgagaagatcaaggccgtgctgtggtactccgacgtgcgcggctcgaccgcgatcagcgagcgcatcggccctgacgagatcattccgttcctcaacgattacgcgcaggcctcgatcgacgcggtccacgacgcgggtggcgaggtgctgaagctgatcggcgacggcgtcttggcgatgttcaccagcgagaacatggcaagcgccaggcgcgcggcactgcgtgccgagcacagattccgccataacatccgcgtgctgaacgatcgccgcgaaaacgagaaccggccgaccaccacggcctatgtcggcctccatgtcggcgaagtcttctacggcaacatcggcagcgaggaccggctcgacttcaccgtggtcgggcccgccgtcaacgaggtcagccggatcgcctcgatgtgtgcctcggttgaccgcgaattgctgacctcgaccgatttccgcaccgggctggatgccgccggccgcaactacctggtttccaccggccgcttcgtgttgcgcggcatcagccacgcgcaggatctctatacgctggatccggcggttgccgccgacgaggtcgtcggcggcaagtatgagcggtatctggcgagctgatcagcagcgcgcaggctcgccgaccatgtccggctgccgcgtcagcgacaccgcgggcgacagcaggatcaccagcgcctgggcggcgaagatcgcggctgcgaggtagaggcaggcttcggcaccgtacaggccgccgacgatggcgcccagcgcggagccgagcgggcgggcgccgtagctcatgatgttgatcgccgagacgcggccgagcagcgagggcggcgttaccgactgccgcagcgtggtggtcgagatcacccacaggatcgggccgacgccgagcaggaaaaagccgaggccggcgagcagcggcgtggcaatccaggtcgtcaacgccatcacgagcgaggcgaccaggccggtgacggggccgagcccgatcacggtgccgaacgccagccgcttcatcacacgggtggcgaacagcgcgccgaccaccatgccgaccccatacatcgcaagtgtcgtgccgacgccggtggcgctgagcccgaggtggcgcaccgcatagggcacgaacacggcgagcagcaggaacgaggcggtgttgaagatgaactgggtgatgaagacgggccgcagcaaggcatggtgcatcacgaaaatagcgccttccttgatgtcctgcaacgggtggcgccgcggtgcgggcgcacgcgccggctcgtagaggccggccagcagcacgaccgcgatcgccgacagcgccgcggcgaagccgaatgcgggcgcggcgccgacccagccgaccagcacgccgccgagtgctggaccgctggcgaacgcgacggtgcgcgccagctcgatgcgagcgttggcggctgggagttgctgcgatgtcaccagtgacgggaccagcgcaggagcagcgacactgtaggcaaccgtgccgcagaccgcgatgaagccgagcaaagcgagcaacggcaaggtcatcgcgccgagccagagcaacagcaggatcgcggcaagggccactgcgcgcagcgcctcggagcccgccatgacccagcgccgcgacacgcgatcggcgagtaggccggcgggaattgcaaacaggatgaagggcagcgtaagcgcggtctgcagcaggccggtctggccttcgccgacgccgagcaccagcacggcgacgatgggcgcagctgcaagcgcgatctgctcggccgattgcgcggcaaggttggaccaggcgaggcgattgaaggtggccggcaggcgaggcgtatcggcggacatggcagaatccttggcaaaattcgatctggccatagtgtgtggttggaagacgtccgatcccacccgtttcccgataacgcaaaaacaaaggcccgccgaggattcggtgagcctttccagaggaagtcaggttgggttcagtcgccgcatcgaagctgcattccctctcccgcttgcgggggagggtcagggtggggctctcacagcgagtcgtgtcgtggagggagcccccacccggatcgcatctagcgatgcgatccgacctcccccgcaagcgggagaggtcgagcgtgtctgccgtcagatcggctcagtctgaaccgcatcgatttcatgcgcctaaagcccgttactgcggcgtgggtcccggtgcgagctggccggtgatggtgccgaccagcgtggccggccgggcatcgtcactgaccgcgggagccgcggcggcctcggccttgcgctgcgccagcgcgctggtcaggctggtcagcgcatcggaccctgccgggaagccggcctccgaaaggatcttgtcgatcatcggcttgaatgccgagaccgacagcaattgcgcggcgagcccgtcgccgagcccgagaccgccattgccgttgccatggccgttggcaccgccgcggccgagcatgctgccggtgtcgaagatccggatgtcggagatcttctcgatcggcttcaccgcctcggcgagcgcgctcgggatcacgttgatgcgggcgaggttgaggtcgtagtcgatcatctcggcgctcagcttgttgcgcgcctccgccttcaatgtcgcaacttctgcctcggcctgaccgagtgccttgacgccagcggcgcgggtggtggctgcgttggcgtcggctttcgccagcacgttggtggcctcggccttgttggccgcagcctgcttctcggcttccgccatcaccgtgatcggcattgcattggtctcggcaaccttgcgcgcggcgatcacgttgatgatcttgtcgcgttcggcgacctcggtggcgcgggcggtggtcaccttttcttcggccgcgatcgcgagtgcgcgcgctgtctccgcgatggtctgggcttccgactgctccttgctcttggtcgcaaccgcgattgcggcttcctgcgccacgatctgcagctcgcggtcggtctcagtggtgcggcgcttgaccgcgagatcggcctcgatcttgcgggtgtcgcgggcctggttggcctcggtctgcttgttggcgaccgcgagctcctgctggatgcggtattcggcctcgttctgcaacgcggtctgctcgacctgcgcggtctgcgcgcgcatcgccgcggtcttgttggcgatgtcgcgctgctgggcgagctcggcctcgcgcttggtgctttcgatcgtcagcgtggtctgccgcgccaccaggtcctgctgggcgatattgacctcggtggtgcggacgatctggttgcgctcctgttcacgctccttggtgatcttggtcagcgtggtcagaccgtgagcgtcgaagaaattgctcgggttgaagtgcttgatgtcgctctggtcgagccgggtcagcgacaccgattcaagctcgaggccgttgttctggatgtcggcgccgaccgcgtcctgcaccgccttgacgaaggtcgcgcgctgctcctgcaactcttccaggttcatggtcgcggcgaccgagcgcaggccgtcgacgaacttggcctcgaccagctcgcgcagctcggcagcgtcgttggtgcggttgccgagcgtctgcgcagcgagggcgatcgaggagctatcgggcttgacgcgcaggtagaactcggcgccgatgtcgacgcgcatgcggtccttggtgatcagcgagtccgggccgccgcgcgcgacctcgagccgcaaggtcttcaggtttaccgcagcggtggagtggaagatcggcagcaccagcgagccgccgtcgagcaccaccttctggccgccgaggccggtgcggacataggcctcgtcgcgcgtcgagcgcttgtaaagctttgcgaacagcagaccgataacgagaatggcaaggacgccaatagcgacgggtatagcaagttcccacatgtgttatgccctgttggaagagtgttgttgttcgaccaggtcggctggagctgatatcgcgatgaagcttttggcgtcgcggtcgaccagcagcacgctggcgccgaccggcaatgcctcggactcggcgctggcacgcgccgacacggtgtgccagttgccgaagacatccttgagacgaacccggcccggcaggccctgatcgagcgggccgaccgacacggtggcgaccttgccgacaaagtcgctgtcgctgaccgcatagctctcgtcgcgcggaatgatgcgggcgaggccgcggctggtgtttctgatcacgggaatgctgcctgcggcggcaaccacggcggcaatggaaaccgggatggcggtgcctgcggcatgcgccagtccctggagcagaaagcctccgatcgagaatatgccaagtaccaggatgatcaggatcaggaggggaagccgcccggcgttgatccagagaaacaggccactgagagcattgtggctctcggcctcgaccgcgaactccttgccgatgagttcgctgatcgaaagtccgaccatggtggtgagcaactcgataccgccaagtgccaccatgatcgcagccgcgaccgcgaagggccgtacgtcgggggcgagcaggatgtcgccaactgcactcatttttctgacttgatcctttcaagccgcgccgcgatttccttttcgcggtgcaggcgatcgagttcgtcaagctccttgtcgccgagcacgctggaagcgggaacaccggtcacccgggcgatcgccgccatggcgcgttcagcactcaatgtattggtcgtcgatgggccccggctggtttcgtccctggcctcgcggaccagactttgttcgagatcggttaatcgcgcctccgcctcgcggcgcgcgccgagcatggcctgcagtgccttggtctgctcatcgatttcgagctcgatgaaatccatcgcgcgttccagcgcgatcacctgcgactccagatcaatttgccgtgcgacgccggcgcgcgcgaggtcctcgcgattttccgcaagtgcgagacggatcttctccttcagaccagcggtttcggtatccagttcctcgcgacgcctcttcaggcggaattcttcggcacgcgacttgccgagcgcatagcgcgcttcgtcggcgccggcgtcgatctcgcggatcgcctgcttgaccagcgcgaccttgttgttgttctcgacattgtcgatggtctggctcgcgatggcggcaagaagccggcccatacgtgcaaggatgccttcgtgaagcatggtcttctcctccggttgtgctgatttcgatttgacggcgatgtggatttcgtagccgcgaccatccgagatcaaatgcgccgggaaggggctttcccagccagagacatatcccggcacgtcgaacggcaccaacacgcgtccgctgacagtgctaatggtcagtgaagttggacccttgatcgcaaacaacttgtcgtcgagcggtatccggcggacggcggcgcccgcgatgtagttggcgcggtcgcgcaggccgagcgtgacgaggcgcgcgggcaggcccgtttccttgcggatccgctcataggcctgggcgtgcagcgagacgaggttggcgccgacgggcgcgacctcggcgagaacagccatcatccggtcataggccgcaaaggtcgcttcgatcgcttcgatgcccgacgggtcgggtgcgagggcgtagcgcagcgttgcggttggcgtctcgacgggaagtttgatcatgcgtccaacgtaaagcacttcctcagtgctttacaaggttggcggccggtatcatttccgtgagcccagatgcagttgcaaatgagttgcaataacgggagagatcggccatccttgagcgatggacgctcggactcctgatatgtctcccgtttctgtttccaacgccgcgcccggcggttggcgcgatgatgccggccatgcgcgcagcctgcctgaggtgaacgcgaccgttcaggtgccgagtgcaggcgtctggtggcgccggctgctcgccttcgccggcccgggctatctggtctcggtcggctacatggatcccggcaactgggccaccgatctcgcgggcggctcgaagttcggctacacgctgctgtcggtcatcctgctctccaacctgatggcgatcctgctgcaggcgcttgccgcgcggctcggcatcgcgaccgatcgcgatctggcgcaggcctgccgtgcgacctattcgcggccggtgaatttgctgctgtggctcgcctgcgaggccgcgatcattgcctgcgaccttgccgaggtgatcggcaccgcgatcgcgctcaagctcttgttcggcattcccctgatcggcggcgcactgctggcggcgctcgacgcgttccttttgctgctgctgatgaaccgcggcttccgcttcctcgaagccttcgtgatcgcgctgttgatcgtgatcgcggtctgcttcgcggtgcagatcgccgccgccgcgccgccgatcgccggcgtgctcggcggcttcatgccgtcgcgcgagatcgtcaccaatccggagatgctctacatcgcgatcggcatcatcggcgccaccgtgatgccgcataacctctatctgcactcatcgatcgtgcagacccgcgcctatccgcgcaccgaggaggggcggcgcgacgcgatcaaatgggcgaccacggattccaccatcgcgctgatgctggcgctgttcgtcaacgccgcgatcctggtgctggcggccgcgaccttccacaagagcggccattccgacgtcgccgagatcgaccaggcgttcgaactgctgtcgccgctgctcgggctcggcatcgcctcgacgctgtttgccgtggcgctgctcgcctccggcctcaactcgacggtgacggcaacgctggccggccagatcgtgatgcagggctttctcgacctcaagctgcccgactggctgcagcggctggtgacccgcggcatcgcgatcatcccggtgatcgtggtcgccgcgctctatggcgagagcggcaccgcgcagctcctggtgttcagccaggtggtgctgtcgatgcagctgcccttcgcggtgatcccgctggtgcgcttcgtgtccgacaagcgcaagatgggcgcgctcgcgatctcgatgccggtcgcggtggcggcgtggatcgtcgccggcctgatcgtgatcctgaacctgaagctgttgttcgatacgatcttcggtacctagcgcgagcgctctatagcggaatgagctttagttgaatcgacttggcgcggtcttgtttcacctctccccgccggggagaggtcggattgcgcagcaatccgggtgagggcccttgctccctcggtagaccttaacccctcactcgatttgctgcgcaaatcgacctctcccaagggagaggtgaagtttcgacgccgtagcagcttagcccaatctcaccaggcgctagtcctgcggctcagccagcccttcgcctgacgcgtcgacgcgcagccagcctgacggggcgagccgctgctgcggcaggaagcgacccttgtagtccatcttcttggagccttcgatccagtagccgagatagacgtaaggcagaccctgccggcgggcgcgggcgatgtgatcgaggatcatgaaggtgcccagcgagcgggcctcgagccccggctcgaagaaggaatagaccatcgacagcccgtcgctgagcacgtcggtcagcgccaccgccatcagctcgtcgccgcggccggtgatcgcgctgtcggcattgcgcttgcggtactcgatgatccgggtctcgacatggctgtcctcgaccatcatcgcgtagtccagcacggtcatgtcggccatgccgccgttacggtggcggcggtcgagataggcgcggaagaccgaatattgctccgaggtcggcaccgccgtgcgctgctcgccgatgatgtcggcgttgcgggcgagaaccttgcggaaattgcgggaggggcggaattcgttggcgaccacccggaccgagacgcaggcccggcattggtcgcacgccggacggtaggcgatcgactggctgcgccggaagccgccatgggtcagcaagtcgttgagatcgcccgctttgtcgccgaccaggtgcgtgaaaaccttccgctcgtgccggcccggtagataggggcagggtgagggcgccgtcagatagaactgcggggtatcacgcgagtgctgggtcacgtctgatcgtcgggctccacaaacaatacaggcagccgagttagcatcgccccccggaggctaacggtcaattggtttaggcgggcctaataggaggcccgcgcggccggagagacctgggtccggaccgagctgttgataatgacggttccgaggatgatgtcgtgcagcagccggcggcggccgttcaggagcccgaccagcagcaccagaggcgacaggaacgagatcgtcacccagaacagcaccgcgtgggtggcgccgagcacgaaatagccgcgggcgccgtaccaggtgcgcagttccagatccatcatgcgcatgccgatggtggccgaatgctggccgccgatcgaggcgccgtaatagacgatggcccagacgatcgaagccggcgataccagccagaacagcgcccagccgaggccgagcgtgaccaggccgaacaccgcaatgaagatcacggcgaggatcaccggcaccgacagcacgaagaggtcgatcaggaacgcgaagacgcggcgcgtcagcacgccgcggaacagttccggctctatcgatggatcgaacgcatgcgggggaacgccgccgtcgttgcgccacgcaccaccgtcactgccgtaagacatgaccaacctccgatgaaacacccgcgcaggacatgggaacaggacgggcgcctgccaagtctgggcgaacattaactagccgaaatattccggcgattcggcggccataggcggtcgcggaacgtgtatgttgcgtacggcaagccgagaggaacccatgagcacacggatcgggctgcgctgcaggtgcggagaggttttcggtgtcgtctcgaacccgtcgccccaatcggccaatcgcgtgacctgttactgcgacgactgccaggcgttcatgcaccagctaggccgcgccgatctgctcgacgcacatggcggcaccgacatcgtccagatcgcgccgtcgtcgctgagtttcgtgcagggccaggacaagattgcgggcgtgcggctgacgccgaagggcctgttccgctggcacacgacgtgctgcaacacgccggtcggcaatacgctaaggccatcggtcccgttcgtcggaattgtcgcgcaggcgttcgacggcggcgcgctgcgcgccgatgaagcgttcggcaagccgatcggcgcgatccaagggaaatacgcggtcggcgaggcgccaaagggctcgaccggattgaacctggggctgatcgcgcgcgccattggcagggtgctgggctggcgcctgcgcggaaaggcgtggccgcatccgttcttcaggcgcgagaccggtgagccgatctatccgctaaccgtgctgtcgcagcagcagcgcgacgccctgcgtccgctgtgcggcccgcatccgacagcaccggccgcgggccagacctagtctaggattccgccttgatcttctcggcggccttcggcgcgaaataggtcaggatgccgtcggcgccggcgcgcttgaagccgaccagactttccatcatggcgcgctcgccgtcgatccagccattggcggcggcgcccgcgatcatcgcgtattcgccggacacctggtacacgaaggtcggcatcgcgaaatggtccttcacgcggcggacgatgtcgagatagggcatgccgggtttgaccatcaccatgtcggcgccctcggcgatgtcgagttcgacctcgcgcagcgcctcgtcggaattggcgctgtccatctggtaggtgcgcttgtcgccggtcagcgtcttggccgagccgatcgcgtcgcggaacgggccgtagaacgcggaggcgtatttcgcggcatacgacatgatctgcacgtcgccgaagccgttgtcgtcgagcgcctcgcggatcgcgccgatgcggccgtccatcatgtccgacggcgcgatcacgtcgcagccggcctcggcctgggtcagcgcctgcttgaccagcaccgcgaccgtctcgtcgttgaggatcttgccatcctcgatcagtccgtcatggccatggctggtgaagggatcgagcgcgacgtcgcagagcacgccgatgtcgggaaactctttcttgatcgcgcgcaccgcctggcagaccagattgtcgggattgagcgcctccgagccttgctcgtcgcgcaacgccggctcggtgaagggaaacagtgcgatgcaggggatgttgagttttgcggcgcgctcggcgtcgcgcacgatctggtcgacggtgagccggtcgacgccgggcatcgaggccaccggcgtgcgggtgttatggccatcgaccacgaacatcggccagatcaggtcgtcggtggtcagcacgttctcgcgcaccagccggcgcgcccattccgacttgcgattgcggcgcatgcggatcgcaaggtccagcgagggcgaggcgagggcatcggtctggcgccgcggcgtgtcgcgcaattcgatcgggcgcccgaatttgatcgccatgttgtcttctccccggggacggctggtctggacctgatataagtctactcctagcatctcgcaggggcgccgtcattgcgccccaagcgaccttgatttgccgcaacggcaattgattttgcgtccccggcgggccaagactgcgccatgaaccccattttgcagctgccatgcggcgattcggatgtctgacacctcgacacgcgatcaggcccgggacaacgccatctcggtgagcgcgatctcgtcggaccggatcgagccggacgacaatgcgtggacgcggcgtctcgtcatcttcctgcgcatcatggccgtcgtttcggtcgccaagggcctctatcactgggcccaggtgaccggcttcgtcggcggcgaggaggaggccttcgagaaccagtcgatggcctggcagaccgccacgatctattttgccgtcatcgagctcgtcgccgctgtcggcctctggctcgcgacgccgtggggcgccgtggtctggctgaccaccgtggtgtcgatggcggtcatcgagctgatgtttcctgccatctatggcggcagcctcaccgtggtcgggctcgaggccgtgatgcttgcggcctatctcgcgctggcctggatgtcggcgcgcgaacgcccgccatagcccacgcaccacgccggcctgatgctgttgcccggctgcgacagggcgacagattgcagtcggcggccgccgattcaagacagtcgtgcccgcaacgagaagacagcttcgccggttctgcaggtggacgcgacagagatcgcatccctatcgaggcgccccgtcccgggagcactccacgggacctgccgtcgggatccattgctccggatcttggtgcgtgtgccgaccggctttgcgcgggccgacggcggaaccggtctcacccgcagccgatgctggcggcttgcgcgtatcgcgcgcgtcccgccgcgatgcgctccgataaaattttcaaagaattttccggtaaccgatcggtcaccgtaaagggttccctcacactcgttacgccgtcgtttcgaattcagacgatgctgtttccgaatgtgacaggaggcgcagacgaagcgtgaacagcagcctcgcaccgtcaatgaaaagttgcgaaaagcccttgatccatgggcttaatccacgattcactgtcttaaattcatgatctctttattctcttatttaagcggatattcaaacggcccccttacgttggacctatcaggcgggacacaagtttcgtcgaataaagtcgataaaaacgacaaacaggggaagtgtcatgatgaaagccgttgcgacaacggcggcggatgccgctgatcgcgctaccggtcaagctccggtgcagccgctctatctcgaagccctgactttggtggagcggctgcatcgccggctcctcgacgtcatcaaggacgaattcgatcgtcgcggccgcgccgacatcaactcggtgcaggcactgctcctgtacaatatcggtgacaaggaactgaccgccggcgagttgcgcacccgaggctactatctcggctccaacgtctcctacaatctgaagaagctcgtcgagctaggcttcctcgatcatcagcgctcgcgcgtcgatcgccgctcggtgcgtatccgtctgaccccgcagggccaggaagtccgcaagatcgtcgatgcgctctatcagaagcacgtcaagacggtggagcaggtcggtggcatctcgaacgaggagttcgcgagcctcaacaagtcactgcatcgcctcgagcgcttctggaccgaccagatcctgtatcgcctctgagctttcctcttttcgcctgatggccaagccggccgcttgagaagaccggcagcctccctccagttcagttcttgctctcaacgcatcggtcatgcccggccgatgcgtttttcatgctgcatgtgcgaaaatatatcggcccagtgaggaaccaacgtgttccccgtgctttatcccgtctcccaacagagagacaggacatgctggtcgagcgcgggattgaggcgctgaatgtcgaggtggtcggtgacgcctacgcgatcgcctcgaactatctgcgcaaatccggcgccattcctgacactttcgccaccaatgagcgcctgctcggcatcatcgtgaagctgttccagcgcggtgagcagaaccggctccgcctcgccaacaaggcgatcgcgaagttcgaggccgagacgctggtggtcgcctgagcgtcaacccggagacttcaatggaagccgctatcgatcgcatcatgcagacatacgatctgctgctcaatcgcacgtccgccgcaagcgacgaagcgcgggcgaaggtgacggagtacgtgcagacgctgttcgaggcgggcgagcgcgatacccatcggttgacggtgtgcgggctgacctatctgcgccagctcgacggcagcaccgaccatgtcaaggccggctataccgggctgtaggtggcacgggcgcgcctccggtcatgatcggacggcgccccagccgcggactgctgtcaccatgcggtttggttgttcgcggggtgatccttcaacagcggcttgccgaacagcgacggcacgaggtcgtccaggaaaagcagtagttgtgcccggaagcccgggccggtcccgccgaggcgattgagcgggatgatcgcttccgccgaggcctgccatgtgactgccacataggcgatgccgggatttgcagttgctgccgtctgttggccgcgagggctatcgaacctgaactcgacaagcggcacccattggttcagcggctcctccctgggcggtccgccgttgaagcggctcgtcaggtagagggtgctgtactggatcgagaaaccccaatgcagcgtttcgacggccggcgagggcacggtgttgaagccaccagtcacgagattgggtgcgagtgccatgccgccggtgccgatcgggacttcatcgacgacggcggcggtgacggcgaatggccgtagccacgcaagcgagtcgggcaggtcgccgaaccccttgccgaagaagatgcccggctggatcgtgtcgggagcatcggcaccgatcgcgaccgagccggagtgaccgatgccccacgcgagtccgatcgagatcagcgcctcgtgacggttgtcgcgataggcctcgtatttgagaccgatgctggtcttgtcgaaacccgaggtgcggccggtcggccaggtctgatggacccaggcgctgtcgatcgtgaaggcgagcgtcggcgtgagcaggcgggcaaaggacgcgttgatccggttctcgacggcgtcgctgccctgtgccggataaccgagatagttgaagttcggcaggatcagctcgtcagcgacggcggggtcgtcgaaggtcatggtgccggcgaaatagcggttgccggcgatgccgtgcgcctgcgcggactgcgtccaaagcatcggcaagagcagcagcgctcgactccgaagcggtatcgacttcacgaacatgcgcccgcccgcatttgcagcttgatcaatatagggtacccccctatactagatgtcatgtcgcacaccatcaagcacaaatccaagctcatcggccgcatccggcgcatcaaggggcagatcgaggcggtcgagcgcgcgctggaatccgagatcggttgcgccgacgtgctgatgctcgtcgcatcggtgcgaggtgccgtgaatggactgacggccgagcttctcgaagatcacattcgccatcacgtcgtcgatccggcgcatgaaaaagacgcggagcgagccagaggcgccgccgacctgatcgacatcgtacggacatacctgaagtagcgaacgaggattactatgagcgatgccagtggcgcggcctttccgggtcttcacagccatgttttcctttctggtgaccaccagaaaagcgaacgcaaaacctgggcggtgatctggctctgcagcgcgatgatgatcgccgaaattgtcggcggttggttgtttggatcgattgcgctggttgctgacggacttcacatgagcacccatgcgggtgccctgttgctcgcggcgcttgcttatacctatgcccggaaatatgccgatgatccgcggttcagctttgggaccggcaagctcggagatctagccgggttcaccagcgctattatcctggcgatgatcgcgctgttgatcggctatgaagcggtcagccgcctctttgccccggttccgatccatttcgccgaagcgatacctgttgcggtcctcggccttgccgtcaacgtcgccagcgcgtggctgctcagtggcggagaccatcatcatgaccacggacatggacacggacaccacgcccatcatgatgaagaggagagccatcggcttgcaaccggtgagggtgatgtggtcctcgaggtgttcgaggacggtgtgccgccgcgcttccggcttcgtgcagaaggtgccactgtgcttcgcgccgcgactgtttcgatcgagaccgtgcgtccggacggcgcccggcaaatctttgcgctcagggattgcggcgactacctcgaatccattgatgagattcccgagccgcacgctttcagcgccaacgtcaggcttggcgagcagacctaccccgtacaattcgaggagcatgagcacgcgcatggatcgacggcgcgagatcacaacatgcgtgccgctgtcatccatgttctggcggatgccgcggtatcggtgctggtcatcgccggccttctgcttgcgcgcgccttcggctggctctggatggacccgttggcgggacttatcggcgcgttcgtgattgccagctggtcgttcggcctcattcgcgacaccggtgctatcctgctcgacatgaatcccgatcgtcgcatggctgacaacctcaagcgttcgatcgagaatgatggcgatcggctcacggaccttcacctctggcgactggggcccggtcatctcggggccatcctctccgtggtgactgcgacggagcggagtgagcaatactaccgggccaaggtggcgcggttccggtcgctctcgcacctgaccattgaagtcagacgcatcgatccgtcggcaacaggcgttgcttgatttcgcttcgagcaaaacacggcaccttcaggctgcgccggcagtccgcgtgagcgcatgaagcgtggcatggcgcggacaaggtctcggactgcccggtccgcgcagacatctctcaccattggtaaagctgaaccgctggcaatcgagcggaggtgcgcttgccaccaaggtgcgacaatttgcgcgcgcgctcgcgcgtcgtccgtcttgccgaaatctgtggcgaatggtcgctaagggcgaccagacctcgcaccgtcgagcgattcctttaggaggttcgcttcccggttgacgcttgcgccacgtgaccggatgcggccaatgatcaatcggctgcctctccaaaatccaggaggaagccccatgatctcgtcccgcatgcgcctgttcggcgcggtcgtcgcgctgcttgtcggggtaggtggtgcggcctccgcgcagcagctcgagctcaagctgatggcgccggctgcgcccggcggcggctgggatcagaccgcgcgttcgatgcagcaggcgctggtcgcggccggtgtcgcgcgcagcgtccaggtcaccaacgttcccggcgctggcggcagcgtcggcatcgcgcaattcgtcaacggcgccaagggcgacggcagccagatgatggtcaacggcttcgtcatggtgggcgcgctcgccatgaacaagtcgccggtgacgctggaccaggtgacgccgatcgcacgcctcaccgaggagattcaggtcatcgtggtgccggccaattcgccgctgaagacggcgcaggatctcgccgcggcggtcaaggccgacatcgccaaggtgacctttgcgggcggctcggccggcggcgtcgatcatgtgatggcggcgctgttcgcgggcacggtcggcgccgatgccaagaagatcaactacattccgttctccggcggcggtgagtcgcttgccgcgattctcggcggtaaggtcacggccggcatttccggtctcagcgaatacgagggccagatcaaggccggcaagctgcgcgcgctcggcctgacctcggcgcagcgcctgcccggcgtcgacatcccgaccttcaaggagcagggcatcgatctcgtgctcgcgaactggcgctcggtggtcgcacctcccggcatctcgccggagcagcgcaaggtgctgagcgacgccgtcgagaagatggtgaagtccgacgcctggaaggagatcctgaagcagaagggctgggatgacgcctatcttggcggcgatgccttcgccgatttcctgaagacggagatcgcgcgtgtcaccgaggtgctgaagtcggtcggcctcgtcaagtcatgacatcggacagcgctcccgagcaagccagccggcgcatcgaccgcgccggcgtcgtgattgcggccgcgctggctgtgctcgcagccgtgctggtgtgggatgcaagcaagctgccgtccaccacgatgtacggcatggggccggaggcgatgccggtcgtcatcgcgatcggtctcgtcatcctggcggtcggcaatctgatcgatgcgctgcgcggcacattgccggcgcgggagagcatggatccgaagccggtgtggctgatcatctgcggccttgcgctgctgatcgccatcatcggctgcggtggcggcttcatcctcgccacctcggcgctgttcgtcaccacatcggccgcgttcggccgccgcgctgtcgcggccgacacggtgatcgcgctcgtgatcacgacactgatttatctggcattcgacaagctgttgacgctgagccttcccgccggcccgctggagcgactgctgtgatggacacgttcgccgcgctggcgcatggcatggcggtcgccatgcagccgatgaatctgctctacgccctgatcggcgtgttcctgggcaccgcggtcggcgtgttgccgggcatcggaccggcgctgacggtcgcgctgctgctgccggtgacctacaagctcgatcccggcggctcgctgatcatgttcgccggcatctactacggcggcatgtatggcggatcgaccaccgcgatcctgatcaacaccccgggcgagagcgcctcgatggcgaccgcgctcgagggcaacaagatggccaaggccggccgcggtggcccggcgctggcgacctcggcgatcggctcgttcgtggccggcaccattgccaccatcggcctcgcgttcctcgcgccatggctggtcgacttcgccgtcaggttcgggcccgaggattatttcgcgctgatgtgcgtcgccttcgtcacggtgtcggcgaccttcggcgactcgccggtccgcgggctgaccagcctgttcattggactgacgctcggccttgtcggcatcgacaagctcaccgggcaggcgcggcttgccttcggcatccctgaactgctcgacggcgtcgaggtgacgacgcttgcggtcggcctgttcgcggtgggggaggcgctctatgtcgcctcgcgccgccatcatgccgaggagaagctcgaggcggtgcgcggctcgttgtggatgacgcgcgaggattggcggcggtcgtggatgccgtggttgcgcggcacgctgttcggctttccgatcggcgcgctgccggccggcggcgccgagatcccgaccttcctgtcctattccaccgagcggcggctgaccaaacatccggaggagttcggcaagggcgcgatcgagggtgtcgcggggccggaggccgccaacaatgcgtcggccgccggcacgctggtgccgctgctgacgctcgggctgccgacctcggccaccgcggcgatgatgctggcgggcttccagcaatacggcctcaacccggggccgctgctgttcgccgagcggccggacctggtgtggggcctgatcgcgagcctgttcatcgccaacggcatgctgctggtgctcaacctgccgctggtgggcttgtgggtacggctgctcgcgatcccgcagccctggctctatgccggcatcctggtgttcgcgaccatgggcacgatcgcggccaagccgtcggtcgtcgaattgtcgatgctggcggcgttcggcgtgatgggctttctgatgcggcggttcgatttcccgatcgcgccggtcgtgatcggattgatcctcggaccgatcgccgagagccagctgcgccgcgcgctcgcgatcagcctcggcgatccgatggtgctgctgcaaagcccgatgtcggcaacgctgctcggcattgcggtgatcgcgttgctcgcgccgttcgttctcaagggactcgggcggttcaaggccaacgaggattaggccacggctcgacgctgccaaacattcgcgtgatccggaaatatccggaccgcagtcccggtcttccgttcagcaacgtagatgcctcgcccgcgcgaggctcgatcaaggcggctgaacaatgaggaccacataccttctggcggcggtcctgctgatgccaacgctcgcgatccaggccattgcccacgaacgaaccggcaagggcagcgatcgcgcgcatgtcggcagcgggctgacaatcggcggcggattgcaaggtgacgggatcgtcggtcgtcagatcgcggcgccgccatggagtgcggcctgcatgaatgacgtaggcccacaacgatgcgacgagccgatgtgggtctatggcagcccggactatgtcgcacagttcaggagtgcattctgacgtcggtcccgcggccgatgggacaatcggtcatatggcccgcctgcaacacccccgcacgatcggttgaatccgccgtcgccgcgttttgactcgccgatgcgctgtgatacgcgtgaggcggggtatgacatgaggcggttcgttctcaggcagcgtgtgggcagggcggcggcatttgtcgcggcctatgcgcttgtcctcaacgtcatcctctcgagtctgctcgtcgccggcatatcgcctgcagccgccgcagccggccagatcctctgcatcaacagcgccgatcccggcgtggcccatgatgacgccggcaagagcgggcgcggcggcgcgatccactgtccgctgtgcatcggtcatcacgtcaccggcgcgctaccgccgccggcgttcgcgtttggagcgcggctgccgatcgcgctcacgacggtccgtgcattcgaggtgcggttcgtcgcacgtttccgatcctatgatcatcaatcccgcgggcctccgacactgacctgaccgccggcgcttcggcgccccttcgttcgtcagatcaaatccggagtcctgtcatgtcatccgcatccgcgcggctgcgcgcctgtgcgctcgccggcgctgccgcagcattcatttcgcctgccaacgctcaatccacatcgcaatcgacgctgccgtccgtcacggtggacgcgccccggccacggcgcgacgcatcggtgcgtccgcagcggcgcgccgcgcgtagcgcgccggcgcggg

SEQ ID NO: 23 - DNA, 131046 bp, Bradyrhizobium enterica
aatacttccacgccgcagccgctggatggtccctcagagatctgtgcatgccctagggccttcgccgggacgacactgagtttgttttcgaatcacgtgccaaacacgcggcgtcatcacccgcgcatgcggcgcccggtcgagccggggcttcgcacgccccggaatgacgtgggagagagacgcgtaccacgaacgacgagctaaaacggcagcgccacgccggtcttgatctccttcagaatcacattggtgcgcacgtggcggatgccggggatccggaacatgaattcgtccaagaatctgttgtaggcgtccatgtcgcgcacgacgacgcgcagatgatagtcggcatcgcctgtggtcgcgaagcattccagcacctcgcggcgctgcgtcacccgcgcgacgaactcgtcgacgaacttgacgtcgtgccgctccagcgagacgtgcaggatcgccgaggtcgcaaagccggcgcgctcgcgcgccaccagcgccgaatagcccgagatgacgccggactcttccagcgcgcggacccggcgccagcacgccgaggtcgacatgcccacggtttcggcaagctgctggttggtggcgcggccgtccttctgcagttcggcgaggattctttcatcctgatcttcaaccatagcgcagctcctgttcggtagattctaccaaaattaacatccaccagcaatctttgaccgaaatagccctagcgaggagaatacataggtgagacctaccaggcacaaggggatagcgttgtcgcaacagacattgcgattccccgagggcttcagtcatgggccagatgccgttgctcgacgcctaccagctttccgagcgctacagcagggaacgcggccgcgtcttcctcaccggcacgcaggcgatcgtgcgcatcgcgctcgaccaggcgcggcgtgatcgcgcaagcggtcccaacaccgcgggcttcatctccggctatcgcggctcgccgctcggcggcgtcgatctcgaactgtggaagatcggcgcgctgctgaaggacagccgcatcgaattcctgcccgccgtcaatgaggacctcgcagcaaccgcggtgctcgggtcgcagcaggtcgagacgcagaatgaccgcgaggtcgatggcgtgttcgggctgtggtacggcaagggtcccggcgtcgatcgctccggcgatgcgctgaagcacggcaatgcctatggttcctcgccgcatggcggcgtgctggtcgtcgccggcgacgaccacggctgcgtgtcgtcctcgatgccgcatcaatccgacgtcgccttcatgagctggttcatgccgacgttgcatccggccgatgtcggcgaatatctggcattcggcgaatatggctatgcgctcagtcgattttccggcatgtgggtcggcttcaaggcgatctcggagatcgtcgagtccggcgcctcggtcgagctgcccgcaccgcgccgtttcatacaggcggattttctgccgccgccgggaggcctgcattatcgctggccggatctgccgggcccgcaaatcgaggagcggctcgaagccaagaagcacgcggtctacgcgtttgcaaaagccaatccgatcgaccgccgcatctacggcatcaaggacgcgcgctacggcatcgtcaccacgggcaaggcgcatctcgatctgatggaggcgctgcggctggtcggcctcgacgaggccgcctgccgccacttcggcatcgacatctacaaggtcggcatggtgtggccgttggcgctgcacgatgcgatggagttcgtgaagggcaagcgcgagatcctggtggtcgaagaaaaacgcggcatcatcgagagccagttcaaggagtatttctacgactatcccggatcgaaaccggagcggatggtcggcaagcatgacgaaaccggggcgcggctgatctcctggaccggcgaattgtcaccgcggatactggccgatgtgctggcgcgtcggctcgatccgatgtttcccgaattgcagcttgcgcgccgcgtcgccgcgctggtgccggagcaggatcggatgatcgcggtgccgggcgcgacgcgcacgccgtatttctgctcgggctgcccgcacaacatttcgacgaaagtgcccgagggttcgaaagcgctggccggcatcggctgccacttcatggcgagctggatggaccgggagacctcgtcgctgatccagatgggcggcgaaggcgtcaactgggcggcgtcgtcgaaattcaccggcaacagccatgtgttccagaatctcggcgagggcacctattatcattccggctcgatggcgatccgccaggcgatcgcggcgaaagccaacatcacctacaagatcctgttcaatgacgccgtcgcaatgaccggcggccagccggtggacggcccggtcagcgtgcaggcgatcgcgcacagcgtccgcgccgaaggcgtgtcgcgaatcgcattggtgtcggacgatcccgcgcatttttcgccggcggacctgccggttggcgtcaccatccacgcccgcgaggagatggacgccgtgcagcgcgagctgcgcgacatttccggcgtcacggtgctgatctatcagcagacctgcgcgaccgagaaacggcgccgccgcaagcgtggcacgatcgccgatccccaacgcttcgcctacatcaacgacctcgtctgcgaaggctgcggcgactgctcggtggaatccaactgcctcagcgtcgagccgaaggagacgccgttcggccgcaagcgcaagatcaatctctcgacctgcaacaaggatttctcctgcctcaacggcttctgcccgagttttgtcactatcgaaggcggcaagcggccggccaagaatgcgagcgcgatcgatccgctggcgcgcgccgccacgctgccggcgccggagttcacggcactcgacaagccctatgatctcctcgtcaccggcgtcggcggcaccggcgtcatcacggtcggcgcgctgatcgcgatggccgcgcatctcgaggggcgcggcgtctcggtgctcgacttcaccggctttgcgcagaaattcggtccggtgttgagcttcctgcggctcgcggccaagcccgacgcgctgcatcaggtgcggatcgaccagggcgcagccgacgcgctgatcggctgcgatctcgtggtgagctcgtcggccaaggcgtccggcacgtaccgcaagggcatgcgcgctgcggtcaacaccgcggagatgccgaccggcgacgtggtgcgcttccgcgacgccgacctcgcctcgccggttcggctgcgcgccatcgagcgagtgatcggatcgggtaatctcaccaccctcaacgccaacgcgctggccgagcggctgctcggcgacagcgtctacgccaacatcatgatgctgggcttcgcctggcagcagggcctggtgccggtgtcgctggaggcgctgacgcgcgcgatcgagctgaacggcgtcgcgatcgagcgcaacaaacaggccttcgcctggggccggctcgcctttgtcgatccggatttcctgccgaaggcggaagatactgccgcgaaggagcaggagacgctggaccaggtgatcacgcgacgcacggacttcctgcgcgactaccagaacgcggcctacgcctcgcgctaccgtgcggccgtcgatcgtgtccgccacgctgaggcggcactcggcggcgaccgcaacgaaggtgcgccccctcccccgcaagcgggagaggcgaaccgagcgcgcggacagactgaacagaacccaaacgaccttcccctcaccgacgccgtggcccgttcgctgttcaagctgatggcctacaaggacgaatatgaggtggcgcggctgcatatgcagaccgacttcctcgacgagctcaagcataagttcgacggcgacttcacggtgcagtaccacctcgcgccgccgctgctgccggcgcggcgcgacgcgcgcggccggccgaggaagcgcgcgttcgggcaatggatccagaccccgctgcggctgctcgcgcagctcaaggtgctgcgcggcacgccgttcgacgtgttcggctacaccgcggaacgccgcgccgagcgagagctgatcggctggtacgaggcgttgatcgacaccatgctcggcaagctcgatgccgcgcggctggccgatctggtcgcgatcgcaaaggctccgatggagatccgcggctacggatcggtgaaggacgccgcgatcgacaagaccaaggcggaggtagcgcggctcaccgcgcttctcacccccgccccgtcagatacgcacgacggctcaggccgccgcgccgcgcttggcgggtgagatcaacccaaccaggacggtcgcgatcaccgccaccacgatgttgagcaacagcgcgccgagcccgacatagaaggtatagctggcatcgccgagcgagatgctggcgagcggcttcagcccattgctccacgccgtgtaggtgccccagccgatgccgaccgcccagccgagcagcaggccctcggcgcggaaccagacggtgaacaggccgaacaccagcgccggcagcgtctgcacgatccagagaccgccgagcagttgcaggtcgagcgcatattgcgtcggcaggaacaggatgaaggcgagcgcgccgaccttcaccaccagcgaggtgatcttggccaccgacgcctcaccggcatgcgagatgcccggattgacgtagtgcttccagacattgcgggtgaacaaattggcggcgccgatgctcatcaccgccgccggcaccagcgcgccgatcgcgatcgccgagaatgcgaagcctgcgaaccattccggaaacagcgtcttgaacagcatcggcaccacgtcgttcggcgaggtcaccttgatgttggcggcataggccatgtagccgagcagcgcgatcaggccgagcagcagcgtataggccggcagcaggatcgcgttcttgcggatggtatccgccgacttcgaggcgaagatcccggtcagcgtatgcggatacatgaaggctgccagcgccgagccgagtgccagcgtggcatagggcagatattgcgcgggcttcagcgtcagtccggtggcgccgcccttggccgtgaaggcgtcgtgggccgccgagaacaccgcgccatagccgccgagcttcgagggcaccacgacaacagccgtcagcaccacgatgtagatcatgatgtccttgacgaaggcgatcagcgccggcgcgcgcaggccggagctgtaggtatagagcgcaaggatcacgaaagcagcgatgatcggcaattcacccgtcaggcccatcgccttgatcacgacctccatgccgatcagttgcagcgcgatatagggcatggtcgcgaccaggccggtcagagccaccgcgagctcgagcgcgcgcgagccgtaggcgccgtggaccacgtccgcggcggtgacgtagccgttggcatgcgccttcttccacagcaccggcatcaccgcgaacacgaagggatagacgatgatggtgtagggcagcgcgaagaagccgtaggcgccgaccgcatagaccagcgccggcaccgcgatcacggtgtaggcggtgtagaaatccccgccgaccaggaaccaggtgatccaggtgccgaactggcggccgccgagaccccactcgtcgagatgttcgttcaccggaccggatttccagcgcgcggcgaagaagcccatcacggtgacgagggcgaagaagaagatgaagacggagagcgccacccaggcgatatggtcggtcatggctgccccctcaccgtgtctcgtcgctgtcaggcgtacggctgcgatagaccagccagatcagcagcgaggagatcggcacccaggcgagctggtaccagtagaagaagggaaaaccgaacagcgacggctcggcgaaattatagaacggcacccatagcaagccgataaacggcagcagcaacagaatccacatggctcactccccagcccgaggccctgatcaaaccggcggtgttgccggtgtcccgtcatcaacgaccccaggaaccattgattgcgtctagaatcacggttgcggcatggcgatgcaaaaagatgtgatcgttgcgccgggcaaccagtctactcagctttgatgccggcgtcctcaatcaccttgcgccagcgcgcctcctcaccagcaaaatagcggtcgaggtctgcgggcggtgcagcgaccatcacgaggccctcattgacgctgagcttcttgaaggcctccgcctgcaccgccctggcggctgatttgttgaggcggtcgatgatgtcgggaggcgtgttcgcaggtgcgtaaaggccgtaccaggattccgctgcgtagccgggcacaccggtttccgacacggtcggcaatttcgggaatgacggtgagcgctcagtcgaggtcacggcgatcgcgccagctggccggcctcgaccagcgacgcgcagcttgcgaccgtcgtgaacatcacctggatctggccgcccaacaggtcggtgatccctggcgccgcgcccttgtaaggcacggtggtcaggttgacgccggccatgcgcttgaacaactcgccggcgagatgcgccgaggtgccggtgccgtaggttccgtaggacagtttttccggatcggccttagcggctgcgatcaggtccccgatcgacttgatcggcgatgctggattgaccacaacgatgttgaacgagcgggccaccagccccaccggtgcaaggtccttgtgcggatcgtaaggcagcttgcggtagaggctcgggttgaccgcattggcgaaggtcgccatcagcagcgtgtagccgtcgggtgggctcgcggcgacgctctgcgtgcctatgatggtgcctgcgcccggcttgttctcgatgatgaccgcaacgccgagatccttctgcatctcctgcgccagcgtgcgcgcgacgacatcggtgccgccgcccggcgcgaacggcaccacgatcctgacgatgtgatcgggataggcggcgcgtgcgggcgtgtgcagcggcagggatgctgcgagcgcgaacagaaccgatgcgagaagacgaagcggcatggcaggccccggcagatgaggcgaccttgatacacgggagcgccatgcaagggatgcgtgccgccatgacgagcgccgtgctgccagtcccgtcaacccacgcccgctcacgaatacggattgatcagcttctgctgctcggtggcgtgatgcaccaggaggtcgatgaaggtccgaaccttcgccgagagatgatgccggtgcggatagaccgcgttcatggtgaactcgaccggccggtactcgggcaacaggcggaccaattggccggactcgagctcgtcacggaccaggaagcccgccgcgagaaacacgccgacgccggccaaggcggcgagccgcagtgtgtcgccgctattggcgatcagattgccgctgaccttcactgatgcctgcgtgcccttgcggtcgacgaaatgccagtcgtcgccatagggatagttgacgtgacggatgcaattgcgttccgcgaggtcggcgagctgcgtcggcttgccgtgctgttcgatatagccgtgcgagcagcacagcacatgccgccaggtggcgatgctgcgcacgatcaggctggaatccggcggcggcagcatgcgcaccgcgagatcgtagttctcgtcgatcaggtcgacattgcgctcgccgatcgcgaggtcgaccttgacctccggataggtcgccaggaactcgacgaccgcgggcgacaggaactgcgccagatgggtgttggtgtagatgcgcagcgtgccgcgcggcaccgactgcaatgcgccggcgatgtcgtcggcctgctcgatgtcggcgaggatatggacgcagcggtcgtaataggcctggccgacctcggtgaggctgaccttgcgcgtggtgcggttgagcagtcgggcaccgaggcgatcttccagcgactgcacgtggttgctcaccattgtcgtggacatgttgagcttgcggccggccgcggagaagccgccggaatcaacgacccggacgaacgcggtcaaactggtcaggcgatccatgcggcaaggtccggattatcagcgctggcttgataatgcttccagttttatcgggattatcacagcggggaggacattgcatctaaagggccgaaactggcgccctttctggaaggacgcaaatgttcggccaggagaagaccatgtcgaccaccgcctatgtccctgaagaaccggccaaaatcggccttcgcccgtcgcggcagacggtcaagcgggtgagcctcgggctcgctgccctgctcggcatcgccgtcgccggtgacttcggctacgactatgtcaccaccggccgttacctcgagtcgaccgacgacgcctatgtgaaggcggactccacgatcatcgccccgaaggtgtcgggttacatcgcccgggtgctggtcaccgacaaccagccggtgaaggccggcgaattgctggccgagatcgatgaccgcgattaccgcaccgcgctgggtcaggccaaggccgacgtcaacgccgcggaagcgtcagtgcgcaacctcgacgcccagctcgaattgcagcagccgatcatcgaccagagcaccgccgacgtcaccgccgccgaggccaatctgaagttcgcccaggaggagcagacccgctacgacgggctgatgaagtccggctccggcaccattcagcgcgcgcagcagaccgacgcggcgctgcgcgccaacaccgcacaattgcagcacgcgaagtcggcgctgtcggcggcgcagcgcaaggtcgatgtgctgaccacgcaacgcgcccaggccgcagcgcaagtcgatcgcgcccgtgcggtcgagcagcaggccgagctgaacctgtcctatgcgaagatcaccgcgccggtcgacggcacggtcggggcccgcacgctgcgtgtcgggcaatacgtgcaggccggcacccagctgatggccgtggtgccgctcgatgcggtctatgtggtcgccaatttcaaggagacgcagctgacccatgtgcgcaacggccagccggtcgagctcaccgtcgacagctttcgcggcaccacgctgaagggtcacgtcgacagcctgtcgccggcgagcggcctcgaattcgcgctgctgccgcccgacaacgccaccggcaacttcaccaagatcgtgcagcgcgtgccggtgaagatcgtgctcgacgatcacagcctgaccgggctgctgcggccgggcatgtcggcaatccccaccgtcaacaccaaggcgacggtgctggccgagcgcgacgagaagcgccggctggcgtcggcgatgcgggcgaacggcggttagcgcaaagcacctcttcaaccggcttgacgcgatcgatcaccgcaacggtggtcgatcgcgtttttgctgcgtcttcctccgtccccttcttcgagccatgagcaccggcggtagggctccctccccccttgcgggggagggagccaatccggtgtgctcacctcactaatcgacacacacaaaccgaacggcgcgctggactggctgcgcggtcgcaagctcgatcacgattatcaacctacgccggacaatccttccactccttcccggattatcgaaagtggccgcctaatacatcttgcgtgggacagcaaggacgaccccgatgaccacactccagcccacagccaacgccgccgacctccccgcaccggctgcgcctgcaacaccggcgatcccggccaggacctggatcgcggtggtcggcgccacgctcggcgccttcatggcggtgctcaacatccagatcgtcaacgcctcgctcgccgacattcagggcggcatcggcgctggcatcgacgacggcggctggatttcgacctcctatctgatcgccgagatcgtggtgatcccgctgtccggctggctggcgcaggtgttctcggtgcgcacctatctgctcaccaacgcgttcctgttcctggtgttctcggcagcctgcgcgctggcgcaggacctgccgcagatgatcgcgctgcgcgccgtgcagggtttcaccggcggcgtactgatcccgatggcgttcacgctgatcatcacgctgctgccgaaggcgaagcagccgatcgggctcgcgctgttcgcgctgtcggcgacgttcgcgcccgcgatcggcccgaccatcggcggctatctcactgagaactggggctggcagtacatcttctacgtcaacctggtgcccggcgccgtgatgatcgcgatgctgttcgtctcgctcgatccgagcccgatgaagctgtcgttgctgcgccagggcgactggctcggcatcatcaccatggcgatcggcctcgcggcgctgcagacggtgctggaggaaggcaacaaggacgactggttcggctcgcccttcatcgtccgcctgtcggtgatcgcggccgtggcgctggtcgcctttctgatcgtcgaattcaccgtcgagaagccgctgctcaatctgcgcttgctcgcccgccgcaatttcggcttcggcatgctggcgaacttcctgatgggcattgcgctatacggctcggtgttcatcctgccgcagtatctggcgcgcatccagggctacaactccgagcagatcggcatggtgctggcatggaccggcctgccgcagctcgtgctgatcccgctggtgccgaagctgatgcagcggttcgacccgcgcatcgtcatcggtctcggatttgcgctgttcgccggctccaacttcatgaacatctacatgaccaacgactatgccaccgatcagctgctttggccgaacatcgtccgtgccgtcggtcaggcgcttgccttcgctccgctgtcggcggtcgcaacggctggaatcgaggcggagaatgccggatcggcgtcagcgctgttcaacatgatgcgcaacctcggcggcgcgatcggcatcgccgcgctgcagacactgctgaccaagcgcgagcagtatcattccaacgtgctgatgcagtcggtctcgctgctggaggaggcaacccgcagccggatcgcgcagctgacgcagtatttcatgaaccacggcgtcgccgaccaggccgccgccacccgtcgcgcgatcgccgcgatcggcaatgtcgtgcagaagcaggcctacatcctggccttcagcgacaccttctatctgctcggcgtggcgctgatcatcgcgctggttgcaaccctctgcctgaagaagccgggccagctcgccggcggcggcggcgcgcattgaatccagatcacaaccaaggaagacgacaatgaaaccccgcatgaacttctaccgggccgcccccgacgccatcaaagcgctggtcgcggtagagagccaagtcaccgccagcggcctcgagcaatcgctgatcgagttggtgaagacccgtgcgtcgcagatcaatggctgcgcctattgcatcaacatgcacaccgaggacgcccgcaagcatggcgagaccgagcagcggctctatctgctcaacgcatggcgcgagtcgccgctctacagcgagcgcgagcgcgcggcgctggcctggaccgaagcgctgacactggtttccgagacgcacgcgcccgacgccgattatgaggcggtgcgcgccgaattcacggacggcgagctggtcaacctgaccacgctgatcggcaccatcaacgcctggaaccggatcgcgattggcttccgcgcggtacacccggtgaaagtaaaggtgacggcgtgagggcgatactgtccgccatctattccaccgtcatgccccgcttcatgcggggcatccagtacgccgcggtgtcggctcagacaccgcagcctctggaatactggatcgcccggtcgagccgggcgatgacagcgcgagtggggacagattaaaccgccgtcgccagggcgaactcgacatagatctcgcgcaggcggtcggtgatcgggccgaccttgccgttgccgaccgtcttgccgtcgatcgcgaccacgccctgcacgaacaccgaggcgctggtgatgaaggcttccttggcggcgagcgcttcctcgaccgtgaaggcacgctcctcgatgcgcagctggcgctcctcggcgagcttgaccaccgccttgcgggtgcagcccggcaggatctcgttgccgttctgccgcgtcacgatgacatcgtcctgggtgacgatgaaggacgaggacgagccgccctcggtgaccttgccgtcctcgatcatccaggcttcgccggcgccggccgcagccgcggcctgcttggccagcacctgcgcgagcagcgccacgctcttgatgtcgcgccgctcccagcggatgtcgggcaccgtgatgacgttgattccggtcttggccgagggcgcgttgatgatgtccttttccgaggtgaacatcacgagcgtcggcttgacgttcgcctccgccttcggaaaggcgaaatcgcgccccttgtcggcgccgcgggtgacctcgagatagaccatgccgttgacgaggtggttacgcttgaccagctccttctggatctcctcgatccgctccagcgtctccggcagcgcgagctgaatctcgccgaccgagcgcttcagccgggccaggtgcgaggcattgtcgatcagcttgccctcgagcaccgcggccacctcgtagatgccgtcggcgaacaggaatccgcggtcgaacaccgagaccttggcctcggaatgcggcacgtacgagccgttgacgtaagcgatcttttccacgcgagttctcctgcgaacgaaggacgaatttcaggccttcgtatacgcaaattgttaacgggggaaaaccccgccctcgtcattccggggcgacgcgaagcatcgagcccggaatccattgggccgcttttccgcggtgaaatggattccgggctcgcgccaagtggcgcgccccggaatgacgccgtggatgggtcagcgcctcagtgctgcaatatcttcgacaggaacttctgcgcgcggtcgctgcggggcgtgccgaagaaatccgccttcttggcgtcctcgacgatctcgccgcggtccatgaagatgacgcggtcggcgaccttgttggcaaagcccatttcgtgggtcaccaccatcatggtcatgccctcgcgggcgaggtcgaccatcacgtcgagcacctcgctgatcatctcgggatcgagcgccgaggtcggctcgtcgaacagcatcgcgatcgggtccatcgccagcgcgcgggcgatcgcgacgcgctgctgctgaccgccggacaattcggcgggaaacttcttggcatgatccttcagcccgacgcgctccaaaagcttcatgcccttggccatggcgtcgtcatgcttgcggcccaggaccttctcctgcgcgaggcagagattgtcgatgatccgcagatgcgggaacagctcgaagtgctggaacaccatgccgacgcgcgagcgcagcttcggcaggtcggtcttgggatcgttgaccttgacgccgtcgagcgtgatgtcgccgccctggatcggctccagcgcgttgacgcatttgatcagggtcgatttgcccgagccggacgggccgcagaccaccaccacctcgcccttggcaacgctggtggtgcagtccttcagcacctggaaggccggcccgtaccatttattgacgtgattgatctcgatcatttggttctcatcagcagcagcgagcacggtttcacctctcccaaagggagaggtcggcgcgcagcgccgggtgaggggtcacggtccaacgacggagcgaaacccctcacccggatcgctgacgcgatccgacctctccctttgggagaggtgaaggagtccgtgccccgaactgaaacccgcatgtaaaaagctaccttacaatggcgatacgcgactgcaggcggcggacgccgaacgacgcgacacaggaaatgacgaagtagaccagcgcggcgaacaggtacatttcgaccagacggccgtcgcgctgtgcgaccttgctggcggcgccgaggaaatccgggatcgacagcacgtagaccagcgaggtgtcctggaacagcacgatggtttgcgtcagcagcaccggcagcatgttgcggaacgcctgcggcagcacgacgtagcgcatcgactgcgcgtaggtcaggccgagcgcgctggccgcggccggctggcccttcgagatcgactggatgccggcgcgcatgatctcggagaaatacgccgcctcgaagatgatgaaggtgatcagcgaggacgcgaaggcgccgaccgtgatcggccgcgacgcgccggtcagccactgtccgatatagggcaccaggaagtagaaccagaagatcaccagcaccagcggcagcgagcggatgaagtcgacatagaagccggcgatgcggccgagccatttgtagctcgacaaccgcatcaaggcgatcagggtgccgaacacgaggccgccgagcgctgccagcgccgtcagggtcagtgtgaagcgcatgccctcgaagaacagatagggcagcgcgcggcggatgacgtcaaaatcgaaattgccgagcatcgtcatttgcccgtgatgtagccggggatcgcgacatagcgctcgaggaagcgcatcgcggtgaccacgacgaaattgaggagaagatagagcacggttgccgcggtgaaggcctcgaacacctggaacgagaactcctgcatcgagcgcgcctggccggtcaattcgatcagtccgatcgtgatggcgacggcgctgttcttgatggtgttgaggaactcggaggtcagcggcggcaggatgatgcggaacgccatcggcagcagcacgtagcgataggtctgcaccgtggtgaggccgagcgcggtcgaggcctgcttctgtccgcgcggcagcgaggtgatgcccgcctgcaattgcacggcgacgcgcgccgacatgaacaggccgacgccgatcgcggcggtccagaacggcgcattcggcaactgcttcaaccagagcccggcggacttcggcagcagctcgggcagcacgaagaaccacaggaacagttgcaccagcagcggcatgttgcggaagaactcgacccagcagaagccgatccacgacgccgtccgcgacggcagcgtgcgcagcacgccgatcaccgagccggccaccagcgcgatgatccaggcgagcaccgataccttgacggtgaccaccagccccgacagcaacaagtcgagataggtgccggtccccatcgggttcggctcaaggaagatgtgccagttccagttatagttcacgggtcccccacgcgatcgcgccggtcacgcattacgccgacattgcgcgcggcgtctatgcaaatgtccggccattctcctccaaaaatggccggacacgctaactttcaggacccgcccccccggggacgacgggtcctgtatcgtgatcagttcaccagataggcgtccggatcgggcgagtccgacggcttcgcaaactgcttcttcatctccggtccggccggcgagttgagattgaggcccttcggcggaatcttctgggtgaaccacttgtcatagatcttctggccttcgccgctggtgtagagcgcggcggtggcggcgtcgacgaccttcttgaacggcgcgtcatccttgcgcagcatgatgccgtagggctccggcttggagaatgcatccttggagatgacgtagtcatccggagacttcgagccggcgacgaggctcgcgagcagaatgtcgtccatcacgaaggcgactgcacgatcggtctcgaccatcaggaaggcctcggcatgatccttggccgggatgatgttgacgctcagcccgcgcgcgaggttggcctcggtcagctgcttgatgttggtggtgccggcggtcgagaccaccgtcttgcccttgaggtcgtcgatcgagttgatcttgttcgccttcttcgtcacgtagcggctggcagtgaggaagtgggagttggtgaaggaaacctgcttctggcgctcggcattgttggtggtcgagccgcattcgaggtcgacggtgccgttggccatcagcgggatacgggtcgccgaggtcaccgggttgagcttgacctcgagcttgtcgagcttgagctccttcttcacggcatcgacgatcttgtagcagatgtccatggcgtagccgacgggcttctggttgtcgtcgagataggagaacgggatcgaggaatcgcggtagccgagcgtgatcgcgccggtgtccttgatgttcttcagcgtgccggtcagctcctcggcctgagcctggctcgcgccgaacgcggcggcgagcgcgaggccaatgagatatttgcgtgtcatacgtctactccttcgtggaacggtcgattgaatgcgtgagaatgtcggcgaggacgggtgcgatgtagcggcgaaactgtccgggattctcgctcatcggaaaatgaccgagatgctccatgatcgtgacgctggcgccccctatagccgctgccgtccgccgcgtgtcctcgggcgtgcaggagaaatcatactcgcccgtaagcaggtagagcttgcatactttagtatcgattgacgcgacgcgaccgcgcaggtcgccatcgacacggtagaaatacaggtcgcccttgaacacgccggggccgccctgcttgtagccccacagcgtttccatccgcgcaggcgccgggctctgcggcgctatcagccccgacaccagcgcggcgcagacttcgccgccgtgaacgtcggggcggttcagccagtcggtgtcataccacggcgcctggaagtcggcagcctcgagcccgatcagcgcgcggaactcggcggcatgttcgatcgcaaggttgagcacgatgcgtccgccgatcgagcagcccatcaccacgggcttctccagccgcaatgcacggcagaaggcacggatggtctcggtgtagcgcgcggtggtgagttggtattcatcgccggtccagctcatcggcggattcgacttgccatgccagggcatatcgaaggcaatgatgcggaaattttcggcaaattgcgcgtcagcgagcagatgccgccactgccgcgcatcggagcccgcggtgtgcaggcagaccagcgggatgccctttccgttctcctcgaaatagatgcggtgcagctcgccgccgatctcgacgtgaacgtagcggccgaccatcggctcgatgtcaccgttcatgagctggccgccgcgaaatgctgccgcggcagcgccagcagatccttgaaatactgcagatgcgccatgaagggatgcaaatcgccttccagcaccgcctcgccacgcttggtcagcgccagcaaatcgtgccagccgggtttcggctcggcctgccaataggcggcccaggcccgcggcgtcgcgcgataggcgaagcgccatgagcgcatcaggaccggcgaaggcacgaactcgacgatgcgtccggcgcggatcgcggcatgaaacggccgcgccgtcgggccgatcaggcagtcgcaatcgagcagccggccgcgcgagaccagccgaggcgcccggtcgagcaatgcgggaaggccggcaaacgccgtcgtcacagcgtcgtcggtggcgtcaggcgatagcgtcatcttgttgggcaggtttcctcggcgagcgcggccatgatgacggcaaccgcccgttctcgcaagccgctgacacccttgggttcctcagattaatcgcttgattaaaccgacccgcttggtcagcgcgcaggccggaacagccgaattcctgctgccaggaactgccaaatcccgacgcccgatcgggtcagctcgtgacctttgcgggccgcacattcttcggcgcctgggccatcgcgcgggccagcacctgggcttccttcttcagcatgtcggcgagctcactttcgcggcgccggatgcggtcggtggcggcgccgatcgacagcgcggcgaccacctcgccggcatcatcgcggaccggaacgccgacgccgcccatgccggggaatgcagcgtcgagcagcacggtgtggccgaccttgcgcgccaccgcgatccgctcgcgcaggaattttggcgtaatgcgcggcgatttcgccagccgcggcacgatcacctcgatcacggcctcgatctcggcgtcaggcagccagaccagcagcgccagcgcgccggcgccgacgccgagcggacggcggctgccgatctgcagataattcggttgcagcgggtggctgccgaccgagcgcgccaggtacagcgcctcgacgccggatcgtaccgacagcagcgccgtgtcggccgaacgctccgacagccgcaacaggctcggctgcgccagctccgcgatgtcgaccgagcgacgcgcaccgaccgccatcacccgcgcctcctggccgagctcataggtcttggcgccggtgaccctggagacaaatccctcctcgatcagcgaattgaggatgcgcagcgcggtcgccttgttgagcgaggtggtgtcggcgatgtcggtcagccgcaacggcgagcgctgcgccagcacgcgcaggatcgcgcagaccttctggatcgcgttgaacttgtcgggttggcccggctccggtgattgcctcttgcggctgttccgcgcggtcgcagtcgtggaggcgttcatgcgctgatcttccttgccttcaattccgattccggaccgggcatgaagagatacgcctggcggacatcatcctagaacggatgatgtgcagcggacaccgtatactttcgtcagatgaaactttgatatcgactatctacgctgctttgcagcaagcgagattattgaatttcgtttcacgaaaatcatgcgagccgcatccttctgattgtgaagagggcagcaaggctgaggatgcagaccgcggtgagataatagcccggcgcaagttcgccgatcagtgcaaagcttcccatccaggtcatgatcgccggccccatgccgccgaacatggtgacgccgatattgtagctgagaccgaggccggtcgcgcgcgtcgccggcggaaacagttccgacatcagcgcggccagcggcccgtaatatagcgacttgaggacgccgagccagagcacgccgagcaggatgatcgtcggcgtcggcttgcccgtgagcagcaggaaggccgggaagatcgagaccaacagcagcagcgcgaacaggatcatgtgcgtggtgcgtccgatcttgtcggagacgaagcccgcgatcggcgccagcagcgcgaccgcggtctgcgcgacgagcgccgccatgaagccgacggtcggcggcaggttcagtgtcttcaccacataggtcggcatgtagacgatcaaataattcaccgcggtcgacaccgcgagcgcaccgatcgcaaggatggtggcgagcttctgctgcctgaacacctccgcgacaggcgattcctgcttcgtggcaggcggcggggtcgcatcgtcgacatggttgcggatatagatcccgaccgggccgatcagcacgccgaacaggaacggcagccgccagccccaggattgcagatcctccgggctcatcagcgaagtcagaagtgcaccgaagcccgcgccgagcaggccgctgacgccctggctcgcgaactgccagctcgcgacaaaaccgcggcgctcgggcatgtgctcgaccaggagtgcggtcgaggagccgaactcgcctcccgcggaaaagccctgcaccagccgcgccagcatcaccgcgatcggcgccaggatgccgatcgtctcgaaggtcggcatcagcgccagcaccagcgtgccgaacgtcatcagcacgatcgacagcatcagcgaggccttgcggccgtggcggtcagcataggcgccgagcacgacgccgccgatcgggcggatcaggaacgacaggccgaagctgccgaaggtcaaaagcagcgaggtggtcggatcattggctgggaagaacgccttggagaggtagaccgcgaaataggcatagaccgcgatgtcgtaccattcgagcgcgttgccgaccgaggttgcgacgatcaggcgggtgatgttctttttggtggtagcgttggcttcggaggtgatcggcgtcgatagagtcatctagattccttggccgtgtcaggcactactctccgagcgggtcacggccgggttcgtcccgctcatccaagtcttccccgtcacccccgcgcaacggcttagcctttgcgcggggatgacggagaaaatgcgcgcgctgcacttcaacccttgagcggcgcctcgccgagatcccagaacaggccggccatgatggtcagcgcctcctcggtcaccggcagcaggatgtgctcgtcgggcgcgtgctgcgaacagcccggataggaatgcggcacccagatcgtcggcaggccgaggccttcggagaacacgtcgttcggcagcgagccgccgaagttcggcagcaccgccggcgccttgccggtggtggcgcggatcgagttcgccgcccagtcgatccatgggctgtccatgtcggtgcgcgaggcgccgaaacgctgcgcgcccgacacctcgaccatcggaaagccgttcttgtgcagatagtcgcgcaccccgtcgatcacttcgagatatttggtgccgaccacgaagcggagttgcagcaccgcgttcgccctgccggggatcgcgttggcgggtttctcgatattgcccgccgacatcgccagcacttcgagcgtgttccaggcatagagccgctcggcggcggtcaggccctcctcgccccaatcctccgccagttgaggttcgtccgccgtcggcttgatctcgacgtcggcgagcgcggcgcggacgcggtttgagatcggcggcggtttgaggatgtcgagcttcatgcggcccttgccgtcgaccaggcttgcgatcgcgttcgccaggatcgtcgcaggattggccagcacgccgccccaatttccggaatgattgccgccctcgcgcagattgacatcgagatggatgcggttgccgccgcggcagccgaggaagatggtgggacgttccaccgacagccgtggcccgtcggaggcaatgaacagatcggccttcaactcctcgcgatgcgcctcgcagacttcgcgcaggtcgggcgagccgatctcctcgccggtctcgatgatgaacttggcgttgaagccgagcttgccgccgcgcgcctgcttcaccgcgcgaagggcggccatgttgatcgaatgctggcccttgttgtcggcggtgccgcggccgtaggcgcgatcgcccttgaccgtgatctgccagggattgagcccgtcgcgccactcgccgaccataccgtcgacgacgtcgccgtggccgtaggtcagcacggtcggccgcgcggcatcttcctggtagtcggcgatcagatagggtccgcgaccggtcggcgactcgatcagcctggtcttgaaatcgagctcggcgaaggccggctgcaaattctccaccagataggcgcgcaacgcgtcggccttgtcggcattcaggctctcggtctggtagccgaccctgcggtccagctccttcaggaactgtcccgattgaaaatgctctcgcacgttcgcgattgcgtcttcccgtgtcgccatgattgttccttcgtccggtcgcggcttgagatgatttcttggcatgatcccgtcggatcgctgcgtcgcacatccggatcatgcttctggaggccggcaacctatcgggatcggcccgccaccggaagggtgtgaatcgcgaagggcccttgccaaaacgtgggaagtcgcaccaatttgacgcgggacgcccaaccgggcagcaatcgaagcggcgctcaaggtttcgaccaaggttttcgacaatgacaaaacagatccggctcaacgcctttgccatgaactgtgtggcgcatcagtcgccggggctgtggacccatccgcgcgaccgcaccaaggactacaacaagctgtcctactggaccgacctcgcgaagacgctggagcgtggacggttcgacgggctgttcctcgccgatgtgctcggcgtctatgacgtctatgccggcaatccggatgcggcgctgcgcaacgcggcgcaaaccccggccaacgagccgttgatgctgatcccggcgatggccgcggtgaccgaaaatctcggcttcggcgtcaccagcaatctctccttcgagccgccctacccgttcgcgcgacggatgtcgacgctcgaccacctgaccaatggccgggtcggctggaacgtggtgaccggctatctcgattcggcggcgcgcggcgccggcaaggacaagcagaccgcgcatgacgaccgctacgagctcgccgacgaatatatggagctggtctacaagctctgggaaggcagctgggaggacgacgccgcgatccgcgacgtcgcgcgcggcatcttcaccgatccgtcgaaggtgcaccgtgtgcagcacgagggcgccaactaccggctcaacgcgatccatctgtcggagccgtcgccgcagcgcacgccggtgctctaccaggccggcacctcgccgcgcggccggcaattcgccgccgagcacgccgaatgcgtgttcatgtcgggcccgtcggcgaaggtgatcggcccgcgggtctcggcgatccgcgagctcgcggcagcgaagggccgcaatgccgccgagatcctgatgttctcgatgatgtgcatcgtggtggcgccgaccgaggccgaagccaaggcgaagtatgcggagtaccgcagccatatcagccatgagggcgcgctggcgttgatgtcgggctggaccggggtcgacttctcgacctactcactcgaccaggaagtccgtcacgtgcagaacgatgccggccgctccgcgatggacaatgtcacccgcgccgatcccgaccgggtctggaccgtgcgcgaggtcgccgagcatgtcggcatcggcggcgccggccccgtggtggtcggcacgccggagcaggtcaccgacaagatcgagcaatggttcgaggacaccgacgtcgacggcctcaacgtcgccttcgcgatctcgcccggcgatttcgaggatatcgccgacatgctggtgccggagctcgtcaagcgcggccgctacaagcgggaatacgccaaaggcaccttgcgcgagaagctgttcggcgcgggacgtgcgaagctcgacgacgcgcatccggcgagccggtatcgcgtgaagcggggtgctgcggcggagtagaggatgctctttcttccgtcatcctgaggagcgcgctcttgcgcgctctacaagatgacggtgagagagccagcgtgcggctccttcaattcacggaattgctgaccaccacttcaatcaacttggcaccgggcctcgcgaacgccgacttcagcgtgcccttcagctcctgcggatcggtgaccttgatcgcctcgagcccgagcgagcgcgcaagcgccgtgaaatcgaccggcgggtcgatgaagtccatgccgacataattgtcatcgccatggaaagcgagcaggcgctgcttgatgatgcggtagccgccattgttgacgatgacgaagttgagcggcagcttgtggttggccgcggtccacaacgactggatcgaatacatcgacgagccgtcgccggaatagcacaccaccgggcgcgtcggattggcgaggctgacgccgaccgcggccggcaggccccagccgatgccgccggaagccagcgcgtgataaccgtagccgtcgcgatgcggccgcaagccgatgatctggcgcgacgaggtgaggccctcatcgaccaggatcgcattgtcgggcatcgcttccacgacctgcagcgccagccagtccgggtcgatcggcgaagtctggctcgccttcgagatctgctcgaccagcgccttgcgcttcgccgcccaattcttcggtgcgagcgccgcgagcccctgcttcgcgcgcgtctccagcgcgcttccgccggtctccttcaatgctggcaccagcgcgcgcagcgtctccttgacgtcggctttgaccgcgatctcggcgccatagttgcgggcgagatcgctgtcgaccagcccgacctgcacgatcgagagcccgtccggcagcggatcgacctcgctgtagaccgacatccgcaagggatcgccgccgagcgcgatcagcagatcatgcggcgccagcacgtcacgcgcgaccttctgcagccgcgcgatcgcgcccatgaagctcgggctctccgacaggaaatgcgaaccataaggcgtcgacgattgccacgccgggcagcctagcgtctcggcgagatcggcggcctcgcgcagcgcgtcgctcttgacgatctcgtcgccgacgacgatcaccggacgctccgccttgaggatgcgcgcggcgagcgccttcagcgattcctccgacgggcggaccctggtgtcgacccgggtggagcggccgagctcgatgccggcctcggcgttgaggatgtcgcccggcagcgagatgaacaccggcccggtcggcggcgtggtcgcgatcttggcggcgcggcgcacgatgcgcggcaagtcctcgagccgcgtcacctcgaccgcccatttcaccagcggcgtcgccatctgcaccagcgggccatagagcaccggctcggtcaggccatggccctgctcctgctggcccgcggtgaggatcagcggcgtgccggtgaagctcgcattgtagagcgagcccatcgcattgccgaggccgggcgcgacatggacgttgcaggcgaccagcttgccggaggcgcggctgaagccgtcggccatcgcaaccaccaggctctcctgcatcgccatcacataggtgagatcgggatggtccttcagcgcatgcatgatcggcagttcggtggtgccgggattgccgaacagatgggtgacgccttcatccttcagcaatgccaggaatgccgagcggccggtgatgcgattcttcatgttccctccacgcctgccagcacgttggccaacggcaccggatgagatgatcaaacttgcgctttgggagcaatcgagccgccggtcatggccgcattccgcaggcgcgcgcctggcgttgaccatgccggcacgatggtgagcgcaagttccaggaaactccctcggcgggcagcatcgaattgcgccgccgagattaacgctactttagcgagagtgtcctaaagcggcggttgtttgtatccgccaggcaggccgaaagcacgcagggcccgcaggccccgcttcgatcgcaggactgattcatggacgcgctgacggcttggaacggcaccaggcttgagagaggaccaggaacgatcaagctcgcgaagccgggaatctatctcttcgtgatcgcgttctcatcggtgtactacctggcaaacgcgccgcttctgctcggtcacctcgacctgggatggcacctcgcggcgggagacctgatcagagaacgcggcagcatcccgttccaggatccgtggtcattcacgctcggcgacagacaatggtataatctctcctggctctgggacgtgatcgccagcgtcgtgtttcaatacacgggatataccggcctcacattgtcgatcgttgcgtgtggcgctgtcatcgccggatatctcacatcgatctgcctcggcagcggcgcctcggcgctcgcggtcggcatttccgttctggccgcctgcctgctttacccggcttttgcgacagccccgaactcctatctctcggcgtcgccaaacacgcccaccatggtgttctgcgtcatcttctacgcagagtgcttgaagcgaacccgatggttcctgctgcccgtgatgatggtgctttgggccaatctgcatggcggcttcatgctcgggctgctgctcattggtttttttggcgcagtgtccgtgctcaagcgagactgggctggcctcaggatctacagttttgcggtcgccggttgcctcgtcgcggtcctcatcaatccgcttggctggcatatctatgacggcgtcgcgaccacgctcggccactttgcgcaggcgcatatcaccgagtggtggtcttacgctgacaacttcaccatgccggggagcattcccggcatcgtctatatcgccatcttcgtcgcgttcgagctccgccaccccacggcttcgagcgttcctctggagtcgcggctgctggcttggctgttcctgctcctgggattctgtcaatacagatacatgtcgttcttcttcatgttcgcggcggtgccgctggcgctgcatttggatcggctgctgcccaagcagctgaacgagctcaaggtgcaaacctcgttgctggtggccgggatcgttggaatgtgcgcgctgccgctgacgctgatccatgtcaaaccggcgctcgcgcttccgcagctgctgtcagagcaggatgcgcgctatctgcagacgcattttccgcatgcacggcttctgaaccactggaacgtcggcggactcctgatcttctacacgcgcggtacggtgcccgtgttcatcgatggccgttcagccactgcctatcccgatgaactgctgcgcgactatttcagcctgatcaaatgggagatcgacgagcccgcctgggatgccgtcctcgacaaatacaagatcgacacggtgctctgggtgaaggcgcacgaacccctgaagaggttcctcgtggacaagcgaggatggaccgaggaatacgccggaacggatgaggtcatctacgtgaagcactgacaacgcccgcgtttccgtgcagccgtcctgtccggaagctgacgagcgcagttcgcgttcttttgtgcatgatcttttcggaaaaccgcttcgcacttttccggatcatgcatcagaacatcccctcgcgctcactgcgcttcttctttttcgaccgctgccagaccacgcccggatagcccttcagcggcaccagcggctcgccggtgtaggcccactcctgcaactcctcgatcgcgatgtggtagagcggctgccggccggtgcgccccgagaacagcgcgcgcgggatgttgaccatgtgcggcgaccgcgcgcgttcgtagcaaatcggcgtgccgcaattggcgcagaaactgcgcgcggtcttgctcttcgcatcctcgtagcgcgacagctcgctttcgccctgcgtgatgcggaagcgcttcttccagctgccgacataggtcgcataaaccgcgccatgcgcacggcggctggcggcggtgtggtcgtgccaggcccagcgcgccggcacgtcgatctcgaaccggaccttgccgcacaggcattgaccgaccgcaggcttcgccagcgccaccggcttgggcttcttggtcggctcgaactcgtcgtccggaaacatctcggcgctccatccgggctacgaaatgacgaagttacgcctgcgccagctcgtcgtgcacgggataatccgtgtagcccttctcctcgccggcgtagaaggtggcgcggttgtacttggtcagcggatagccgcgctgcaaacggcgcggcaggtccgggttggagatgaagtagcggccgaacgcgatcgcatcggcatggccctcggcaagtgcgcgctctgcgctgtcgccgacgaaattgccggccgtgatcagcaccccgctccacatcggccggtacagcaccatcgccgacggcacatccttccaatcgacatcggcacggccggtgcccgaggcgcgcggctcgatgaaatgcagataggcgagcccgaacttgtccagcgccttgatggcgtggctgtagagcggcatcggatcggcctcgccgctaccattggcgatgccgtagggcgacagccggacgccgacgcggttggcgccccaaacctcggtcaccgcctgcgtcacctccagcaggaagcggacgcggttctcgatcgagccgccatactgatcggtccgcacattgctcttcgattgcaggaactgctcgatcagatagccgttggcgccgtggatctcgacgccgtcgaagccggcggcgagcgcgttcttcgcgccctgcctgtaagcctcgaccatcagcgcgacctcggcggtctccagcgcccgcggcgtctcgtactcgaccaccttgccgtccgccgtcatgcacttgaactcggcggggatcgcaaccgccgacggcgccaccggcagcgcaccgtcaggctggaacgaggagtgcgagacgcggccgacgtgccagagctgcaggaagatcaagccgcccttggcgtgcaccgcatcgaccacctcgcgccagcccgcgatctgggcctcgctgtagatgccggggacgccgggattgccgaagccggtggcgaccaccggcgaggcttccgcgatcagcaggccgccttctgtcgcgcgctgcgcgtaatattccgcgttcatcggccgcggcgccagactcggccgcgccgcccgcatccgcgtcagcggcgccatcacgacacggtgcttcagctcgtagggaccgaccttgagcggtgaaaacagcgacgaagaagtcatgcctaccccaattaatcttatgtcattgcccgttatctaacgggttcatcttgttcatgaaaggaggtagtggcaatctgttgccgagagaaggtctcccatgtcgaaatcgagcgcctcatcgctcccctccctcagcgtccgcatcgacctcgatgccgaggaccggatcgggccgggcaagatcctgctgctggaacacatcagagaatgcggctcgatctcagccgccggccgcgccatggacatgagctacaagcgcgcctgggacctggtcgacgagatcaatcgcatctgccggcaggcggcggtggagcggcagaccggcggcaagaacggcggtggcgcggtgctgaccccgttcggcctctccctggtggcgcgctaccgcaagatcgaacgcgacgcggcgagtgccgtgcgcaaggagctcgaggcgctgcgcagcgacatcggcaagccgaagaaggccgtagggcggtgagtgcaccggcggtcaacgcagggacccgctttcgaaaatatcgaaaacaaccccatgcaaaggagccggtggcggccggcgctcgacaacgcaacttgacacgtcgggcaactcaggggtatatttctaatattccgaaattatgtgccctcgccgggtgcccccacaggcgacaaggttcatcgcatttcgcggcaatgccatcgcggccatccttcggaacgcccgccttcggcaggctccccgggatgaggggcttgctcagtgtcatcacccgcgcatgcgcatgcgggtgatccagtattccagagacgtctgcgcttgaatcgaggagccgcggcgtactggatcgcccggtcccgtcttcgccaaggcttcgacgaggccacggacctcggcgcgccgaagctttagcggaggcggcaagccgggcgatgacagcggtgagcgaggatatgcgccttgtttcaggcgctagcccgtcttgatccagaccgccttgacgttgagatattcctcgacgtgctgcttgccggactcgcggccgtagccgctcatcttgtagccgccgaacggcaccgccggatccatcgcctggtagcaattgacccagaccgagccggcgcgcagcgccttcgcgacctggtgcgccttgctgacattggtggtccagacgccggagccgaggccgaaggtggtggcgttggcgcgcttgatcagctcgtccggatccttgaacgagatcgccgagatcaccgggccgaagatctcttcctgcgcgatgcgcatgttgtcctgcacattggcaaacaccgtcggctgcacgaaatagcccttcgagagcgcgccctcggtgaggcggccgccgccggcaagtgccgtggcgccctccttctgtccgatgtcgagatagccggagacgcggtccatctgctgctgcgacaccagcggcccgatctgggtgttgggatcgaggccgttgccgacctgcagcttcttgccgaactcggcgacgcggccgacgaattcgtcatagaccttctgctcgacgaacaggcgcgtgccggcgctgcagatctgccccgaattggcgaacacggccatcgcggctcccggcaccgccgcatcgagatcggcgtcggcgaacacgatgtccggcgacttgccgccgagctcaagcgaaacccgcttgaggttaccggccgaggcacggatgatcgactgccccgtgacgtgcgagccggtgaaggcgaccttgtcgacatcgggatgcgatgccagcgcggcgcccgcggtctcgccatagcccggcacgacgttgacgaccccgggtggaatgccggcctccatgcagagctcgccgatgcgcagcgaggtcagcggcgattcctccgccggcttcagcaccacggtgcagccggtcgcgatcgccgggccgatcttccagatcgaggcagtcagcggaccgttccaggggatgatggcgccgaccacgccgatcggctccttcagcgtgtaggagaagatctcgccgggcagcgagttctcgatggtctcgccgtggattgcggtggcctggcctgcgtaatagcgcagcatgccgagcgagcgcagccggttgccgcgggtgcggctgatcggcgcgcccatgtcgagcgtgtcgagctgggacagttcctcgaaattggcttcgaccagctcggcgagcttgagcagcatgttctgccgctcgaacggcttcaccttgctccacggcccttcgaaggcgcgccgcgccgccgcaaccgcgcggttgatgtcctcggcgtcgccctcggcgacggtcgcgagcaattcaccggtggcggggttgtgggtttcgaatttcttgccggaggcggcgtcgacccatttgccgtcgatcagcatcttcttgtaggagccgtcggcataaggatggcgcgtgatcggaactgcctgcgaaacagccatgtttgcactccctgtcaaattgtcggctgaggtgttttggaagcgttatatcccgaattctacagcgcggccgcgaaaccgtaaagcgaggcgagcgttgtcgagggtggcgcgcatgaaaacctcccatgcgcctgcctgcatggtacgatgatttagaacctcagccacatatgtgtccggagaccgacgatgccgcaccccgtgatatcagccaatcatgttgccgtgatcaccggaggggcatccggcatcgggcttgctgccgcactgcgatttgcggaggccggcatgaaggtctgcatcgccgatctcggcgacgacaggctgaaggcggccgcggcaaaactgtcatctgcggcgccgggcggcgcggccgacatcatgacggcggcggtcgacgtcagccgcgcggacgcggttgcggagctcgaagccggcgtcgcgaaaaggttcggcggcaccgacatcctgatgaacaatgccggcatccagcccggcagcgcgatgttcggacccgcggacaattggcagcgcatcctcggcgtcaacctgtggggcgtgatcaacggcacccaggccttcgtgcccaacatgatcaagcgcggccggccggggctgatcatcaacaccggctccaagcagggcatcaccacgccgccgggcgatcccgcctacaacgtctccaaggccggcgtgaaggcgttcaccgaggcgctgcagcacgagctgcgcaacaccgacggctgcaagctgacggcgcatctgttgatcccgggcttcgtcttcaccggtctgactgcgcgcggccgcaccgagaagccggccggcgcctggaccgcggagcagaccgtcgatttcatgatcgagcggctcgaggccggcgatttctacatcctctgccccgacaacgatgtgccgcgcgcgctcgacgaacgccgcatcctgtgggccgccggcgacatcgtcgagaaccgcccgccgctgtcgcgctggcacaaggattacggcgacgcgttcgcagctttcgcgaaaggggagtaggaagagaatcttaggatgggtggagcgcagcgaaacccatcacctctcctgcggtccgctatttgatggggatcgctgcgctccacccatccttgcacacttgatgctctcgtcattccggggcgcgcgcagcgcgagcccggaatccatcgggccgcaggctttgtggcacgatggatttcgctgcgctccacccatcctacgcggcgcgtcattgcgagcggagcgaagcaatccatgctgcagcgtgcacggaacgatggattgcttcgtcgctccgctcctcgcaatgacgacggaagcgtcctacagcgtttcctgcttgtggtcgcagttcttgcaggtgaacttgacgcgggtctgacccttctccgcctgcacccggttcggcgcgccgcacttgccgcagaccgcctcgatccgggtcgtgccctgcttgatgaccaggttccgtttttccatggtctcgcggatcaggcgttccgcttcctcgcgcaacgattgcttcgacatcatcccaccggtcattggtttgcgggccgcctcttagcacggccgcgtgaagctttgacagggggtaccgatcagacgatcaagcgatccaccggcatccggtaatgccgcggattcagcagtttttccggccggccgacgcggaatacgttgacgaggcgcaggtcggcaccgaccttgccgagcttgcgcagccgctcgttgaagtcgggatgatctgccagcgccgaaatcgggcatgccgcgagcccggcgcggtcaatctccagccagctgcgatagaaatgccgccccgtcgtgagtggatcctcaccgaccggacgacagaacaggacgatcgccgatgccgaggcggtcttggcgcggtcggcaagcaacgatgcggcgaggccgagacgatcgagcggcctgaacaggctgccgagcacgaagcgggcagccgtggcctcgaccgcgttcatggcgagcacgtcgcgattgagtccgtcgagctgatagtgcggatgaccgggcgacagccgcatccacccgagcagctcggcccggtagtcgtcgccgtggataaaggagaattcggcctggtcggcccaaccggcgatctccgtgattgtctggcgatggcagatgcagatcgaatcgtcacgcgcgacggcaagctgcaccagcggcgcaggatcatccgccgacttcgtgaatttgccgcgccacgacatccggtgcgccacatggccggccaatggatcgggcgcgacaccttgcctgatcgcaaaactgcagagcagggcatattgcggcgacagcggctgctcgatggtggtcatggccgtgatcgcaaggccgcggcggttgagggcgaggctcatgccctccagtgccgcgccgtgcgagaccagcacatcgtgtcccgcggggtcggcgaccggcgcgcggacgccggtgtcgtcgaccagcgccagccgtccgtcgccgagcaagcgccagcgcgtcggctggatattgtggacgctcggcgccagccgcgcctccgcgaccagctcacgcagcagatcgggcgtcagttcgctcatgccgcagccagccgcttggtgaacaggtgcagccggtgcagcggccgggcgccggccttctcgacctggcgcagcgacggagcattgatgtccgcgatccaggtgccgccgagcgtgcggtagccggcctgctgcaacgccagcgcggtgcggtagagcatcgcgccattgaggccgcgattgtgcaggtcacgacagaccgactgatagatcagcaccgcgcgggtgttcatcatgcgatgctgcacgaatttgaacggcgcggtcagcccgatgcggccgccgatcgccttgatcagcggattgaggtcggggatcgcaatgatcgcgccggcgggacggccgcggtgatagaccacggtcgaaatccgcttgtcgatgatccacatcatgtcgccggcctggaacagatattccgccgcggtcggcggcacgaacatcgggttgtcggcaaagccgtcattgaggatcagccgcgcatcctccagccgcaccttgaaggcggaacgcttgatcggctgccagacgaaatccggatcggccagcaccgcacgctgcttgtcgccgagcagctgctccggcttgccgccatcgagtgcgatctcgaacgtcgtcatcgggaaggtcgcggagtaaccggcgcgttcgaggtgctgcgcgatatgcggcggcgaccacatcatgtcggtgaacggcgcatggtcgaagccgtcggtcacgacgccgatctgctgcatcgccgtcagattgaaattgccggcaatccggctcatgccgcgcgccgacagccattgctcggccgcgcgcagcagcgcatcggccacttcgacgtcgtcgatgcagtcgaagaagccgaacgcgccgtgacgggtgccgtgcttgcggtttgaggcgtcgtggatcgaggcggcgatgcggccgaccggttttccgtcgcgatgcgctgaaaaaagcgcatagcggccatggccctcggtgacgaacgggtttttcgcggcatcgaacatccggtcgaaatcgctccacagcggcggcacgtagagactgtcgggcccataggcattgagcgcggcgtcgaaggccgctttgcggtcgccctcgcggatctctgttgtcatttggcctccggggtcagcgccagcagccgccgcaccagcgccagcgcggtttcggtggcgggatcggccgcggtcaccggcacggcgagcacgatcaggtcgagcggatcatgcccgagcacgatgacgtgggaggcgttgttggccgagatcagcgacacgatgcgctcggcggccgggtcggtcgacaccaatccccacggcgcttcggacgagcgcagcacgcgccgcgccgacaggaagtcgcgcagcagcggcggatcgtagggcccgagctcgtcttcacggaagcgccgcgcgctttcgaagatcggatgccgcgcgagctcagcgatcagctgctcgcgggtctgcgccggcgacgccgcgaccgagttgagcacgcccggctcctgggattcgaacagtgcccgcagcgcgtccgtcatcaggccgatggtcaggacgccggcgatcgcgaccgcgacgaaccggaccatctgggcggcatcgacatcaggcgccatgaagctggcagcgagaccgagcaggcccgaagagatcagccgcagcgccatcatggcaaggccatgccggcgcgtctcggcgccgccgccagcaatcagcatcacggtgaccgtgagcagtgcccccagcgcgccgagccgcaccgggatgtccggaaacagcgtgcggaaatcggtgaggatgaacgggatcaccaccagcgcgccgaccgccatgcggccgatgctgcggttctcggaggccatcagcgcggcgcggtcgcgcgtcgccagcagcagtgcacaggtggcgaagcctgcgagctggaacagcgccagcgtgatcgcatagggcatcacgaagcgctgcagcccgaacgtgccgccgagcccgagcaggatgccgccggcgagcgccgcgatcttgaccgggcgcggcgcgtgccgccgcaggatgccctcggtgacgatcagcgcgccgagcgggatcagcgcggccgggatcaccgagaggcgatcgagcacgaagcttccgctccaccacgcaagaccacggtcgaggaacagggtcgcgatcacgccgagcgcgagcagcaggcggcgggtcagcgggctcctcggatcgcgccgatagaacgtcatcatcgccaccgcgacgccgatggcgccgcagagattgacgatggaatcggcgatcaccccggaggtcatgcgacgcccgtcaattgaacgatcgcgcgccgcaccagcggacgcatcagggccgcgaccagcgcgttgcgcggcttctcgatcgccggccggtgcggattgaggaaccagccgcggcaatcggtgccggagctgcggccgaggatcagcgcgacagcctcataggccatcagcatgccggtcgagatcaccatcggcgcgaacgacatccggctgcggcggccggccgcgacctcgccggcgatcgcgaggtcgacatagttgcgcgacgaggaatgcagcatcacgtgctcgatctcggcacgcatcgcggcgcggcggtcgtcgtcggtgatgtcagtccagtccttgccgagcgtgggaaagccgaggcgctgctcgggccgcggatcgcgcgggcgcaccacgatcaccgacggcagcggcgacatataggcgtcgatcacggttgcctcggcgtgcttggcggtccggtacagatgcacgccggcggcgatgtcgtccatgccgttgacgatgaccgggcagcgttcggcgatcccggcgagctcgctggtccagttctcgccgagcacctcgatctcgatggtcgggttgatgcgtttggcggcttccgcggcaaccgccgccttttcgcggccgacctcgtcggcgaaggcgaacacctggcggttgaggttggagacctcgaagcggtcgatgtcggcgatcacgaaccggccgacgccggcgcgcgccagcgccatgaaggccgcgccgcccatgccgccgacgccgcagacgaacacccgcgcctggcgcaacagctgctgctcgtgctcgtcgatgaagccgatgttgcggccggtgaaggagtaatagtcgaagttcatcgcaccgccccgctgtcctgccggcgcggccgcagcgtgccgaaggcgcggctgtcgtccagccagtacaccaccggcaacaccagccgttgcagcgccagcatcgcggacgccgcgagcaatgccggcagcgagcccgagggcacctcgctcatgatgtaacggcgcgcgccggccagatcgacgcggccgagctgcagcacgtcatcgccgcggccgtaatccagctcgcgctcacagaactcgttgtagacggcattgcgatgcttcggtgcgatctcgaaggttttcttcagcgcatccgagccgccggtataggcattggtgatgaccgagcgcgcctcgtcgaagccggcctcctcgccgacaccgaacaccgcgcgatgccgggccatgatgccccgcgcgagctgcagatgcgcaaagctctgccgggcgcccggcagcggcgacgggaatacatccgagaaggtgtcgctgaccatgccgaccaccgccggcacctgggtgacgttggagatccatttcggccgcaagccgtcgcgggcgaacagcaccagcgcggtcaggccataaagcacccaggacagcccctgcccgcgcacatcgggatcgaccatgacgaggccgagatgggtcacttcaacgggctcgccgtcgagcggcacgtccatcaccgacagcgcattgaaggcgatcggccggccggtgtcttcctcggagatcaaagtgacgacagcgcgcgacagccgctcgggctcgccggagaagatgccgtaggtcaggctctcctcgggcagcgtcttggcggcgacgatgcgcagctgcccgaccagcgcgtcgagttcgtccttgggcagcgacaggccgggggattcgacgatccgggtgcgctggccggcctgggtgcgcaaggtgagatcgatggtcggctgcgacagtgccttcagccagaagccggcatggttgcgcaggccgtcgaaggccgcgcgcaccttggcaaagcccgagctgccgcgcgaagccggcgtaggattgtcggtggacgccatttctctctgtccctcgggcgcgatctctgcactcgcccctgttaaggagccatgagcgcaacctgacgctgctcgccgcagggtaaacaaggccttccggaaacggaacaagttggtccgaacaacgaaagcggcgggtgcaagacacccgccgcttcgcatgcctccagctcacgccgccttggagacttccatcagcaggcgctcggccttggcatcctcgatgcggttgacgaacttgccgctctcgtaattgtcgcggatcgtcttggtcagcgtgacgcaggtctgcaccagcatcacgatgcccatcgtgagatagcccttcatccagaggtcgatcggcaggaagaacacgccgacggcgacgaggaaggcggaagccgcgaaggatgcgtaggtgaaggtcacccagccgctgctgtggggttggatcgtctggttcatggtggtctccttgatcttgcgaggtttgatgttggttcagttgcaggcgagaggttcaggcggcgggcgggcgcttggccttgagccgcgccagcacgtcgtcggccgtcgatttcatgcgtgggccaaaaccctgctccgcgagcttctcggcgacgacgaccggtcccgaggcggtatcgatctcgaacagcgcgtcgtcggccgcctggatctcgatctgccgctcgcgcagccgcttcagcgtcgcttccgcttccggcagcgttgattcgtagggccgcgccgcctcgatgccgctccggcgcagcgaacgcaccgcctcggacgcgcgggcgaggcgccggccgcgatcaagctcggcaatgcgcgcctcggcattggcgacgtggcgcttcagccgggtgatctcggtggcgaacagcgtgcgcgcggtcatcgcggcatcgcgttcggcttcgaggttggcgatcgcctgcgcggcttcgcgcgcgaggtcttcccggccgccctcgagcgccgccgatgcgcgcacctcgagatcggcgatccgggtgttggtggcgtcgagccggcggccctcctgcgcgtcgccggcgatcgcgagggccagcgtccgcttcgagcggtcgacggcggcggcggcatcacgcatctgctggtcgaggacgaccagcgcggtccggtcttgcagttcctcttccgctgccgccacgctgccgcggaaaattgtcaaaacggttttgaacatttggtcgctccctgttatgagcatcgctcatgaatctcttgtaccatataatgagcattgctcaagtattatttgagcgacgctcaaggttgcggttaacgacgggtgaaacatgtccaaggcattggaacgacgagcaaaactacgcgaagcgctgatcgaggcggcggaacgggcaattgcggcaaagggcctcggcggcctgaaaacccgcgaactggcccaggaaatcggtgtcgccaatggcggcgtctacaatctggtcgaggatgtcgacgagctgatcctgcgcgtcggctcacgcacgctggcccggctggatgcctcattgtcgctggcggagatcggcggagcggcggcgccgcgcgagatgctggtgcggatcgcggtcgcctattgcgacttcgccgccgacaatctcgaactgtggcgagcgctgttcgagcatcgcatgcagcccggcaagccggtgccggaatgggcgatcaccgagcagatggaattgttccgccacatctacaagccgctcgcagcactgtttccgcagcgctcgccggcgcagctcggcgtcaccgcacgcagcctgttctccgccgtgcacggcatggtcgcgctcgggctggagcacaaattgatcgccgtgccgatcgaccagctgcgcagcgagatcgcgacactgacgcgcgcgatggtcgacggactgacggcgaagaaggagtagcgccggtgtccccatccagcggaaaatctgcgcgcggcatgagctgcggcaatcggcgccatgctgctttgacgaccgatagactagcagagcctctggtttcgcgaccccgcgacttgtctaccggctgtggggttctacctattacagcgcgcaaaggccgccctgcccggcggcccgcgcatcgaagcaactgaggtcacgcgcgtgtccaccaatatcgatccagaccagcacgacgacatcatgtacccgcaggtcctgccgtttgtgttggtccacgcggggtgtctggcggcgatctggaccggcgtctcatggcaggcgatcgcaatttgcgtcgcgctgtactggctgcgcatgtttgcgatcaccgccggctatcatcgctacttctcgcatcgggcttacgcgacgagccggacgtttcaattcatcctggcattccttgcccaaagcagcgcccagaaaagcgtgctttggtgggccgcgaaacatcggcatcaccatcttcattcggataccgagcacgatgtgcattcaccccggcataagggcttcgtgtacagtcatgtcggctggatcttctatcgacagcatgatgcaacggatctgacgaaagtttcggattttgccgtctatccggagttgatgtggctgcacaggctggaggtcttgccggcgatcgtggtcgcagccctgtgcttcctgattgccggatggccgggactggtggtcggtttcttctggagcacggtgctggtgtatcacgcgacgttttgcatcaactcgcttgcgcatgctcacggacgcaagcgctatgtgacgggcgacgactcccgcaacaattggctgctggccctgttcacgatgggcgagggctggcacaacaatcatcacgcctaccagagcagtgcgcggcaaggcttccggtggtgggagatcgatgcgacctattatgtcctggtggcgttgtcctggctcggcatcgtccgggagctgaaggcgccgcccgcgcaggtgctccgcaacgagcagcgcctgggatcgcgcgtggtcaagcgaacggccgaacagctcgccagccgcttcaatcccgaatacatcgcgcaggccatcagaacgtcggtgcacgaaaccggattgtcggtgcgggaggcgcttgctctgttgcagcaccgtgccgacctgcatctgcccagcgtcccgacgcgagagcggttgctggcggaagcccaggcgatgttcgccaagacgagttcgctggacgacatcgtcgaccgcgcacatgagctgctggtggaatcggtttgcctgctcctggcggtccccccggcgctggccggcgcaaggtcgaaacctcaagcgagccagcggtagcgtcttgcgacacaacaagcctcgaagcatttcaacacatgccgctcgggtgcggcgaagcccttgcctgccctgctcccgcgttgcaggattcaagcgccgaaaaccttcagcagtgggccttgcatgaaaccgtgtatcgtggtcgccgcagtggcgctcatccttgcagtatcaagagtcacgccggcctccgccgcgcagctcataccggaatgctcgatgtcggcgacattggcggattggggcgaaaactcgaccggcgatatcgatatcgcctcaggcgaaagctgccagatcccgatcgggatccgcggcacggtgacggattcgtcgatctcgcagaagccggcctatggcaaattgaagaagatcaacgcgacgaccttcgagtaccgggcgaaagccaagtacaagggcaatgacagctttgccatcaaggcgacgggtcaagggccgaaggcctccggcacctccgtcatcaccgtgcacgccacgatcaagtaatcgctctggcggcattcgactccctcgccccattcttacagggagaggtgaagcagagtctgcggctcgtgttacgccggccgcgcgccggtgcggatgattgagccgatatgctggccgcgcagcgccgcggtgagccggccgggaaccagaccattgatgacctgcacgcgctcgatgtgcctggcattggccatcacctcgagcagcgcgggatcgaacggcagcgtgcccttcagcctggcgagatcggcgaagctcgtctcacgcagcagctcggccttcttgccctcgggaccattgggatcgtcggtgtagacgccgtcgacatcctcgacgatcgtcagcccggcggcgccgagcgcatcagcgagcaggaacgcgccggtgtcggcgcggtgcaacgggatgcgcgagttcggaaactcgtgatggtgatagggcgggaacgcgctgccgaccaccgcgcgcgacgcggagaggtggatcgcaagctggctcgcgatggtcggatgctcgatataggacacgccgtccggcgcgagcaagcagccgaggatatggccgttctgcccggcctcgctcgccgcgagcggctggagcgagccgaccggcagtccgaggtcgaggccgacgctgtagagatggcgggcgcggatgccggcgccggtcaggatcagcatgcggtgctcgggcagcagtgcgcgcagctcaccgacgatcggcaggatcgcctcatggccgcgatccatgatggagcggccgccgatcttgatcacctgcagccacggcagcagcggaatcgaacgtccgccggcgacgggacgggtgagatcgccgtcgagcagggtctggcgcgcgagcggcgaagcgacgtgcttgatggtgtcatccatggtcgtgtctctgctcagttcgcggtgatgatggtgccgatatgttcgcccgcgagcgcgcgggtgagattgccggggacgaggccattgacgatctgcacctggcggacatggcgtgcactggcgagcaggtcgagcaccgggaattcgaggatcgaatcctgcaggcccttggccttcatctccgcgaccgagatcttcggaatgaaggtcgcgcccttcgaggtcttggggttcgcggtgtagaggccgttctcgtccttcacatagatcatcgccttgcaaccgaactgttcggcgacgaggaagcaaccggcgtcggtgcggtagggcgggatcattccctcgggcgcaggccgcatccacaggccatagggcggcatgccgctgaagatcacggcgttgacctcggcgagatacagcggcacggccgacaggccggcgccgctgaccgcggagatgccgtgcttggcgagcaattggcccagcatcaccgcgttctggtcggcgaccgaggcgccgagctgcgacagcacgccagccggcagccgcagcccggccgcgatcgaatagagatgccgggcgcgggtgccggcgccggttccgatcagcagcttgtgcgccttgcgcgcggcgacgatctcgtcgaccagcgggtagacggcggcacggccgcggtcgatcacgctctgcccgccgatcttgatgacggtggcatcgggcaggatccggaagtccgacgccgcctccgccgtcgccaaaagctgcggatcggtcagcgaccgctgcatcaggagcgcttcgagctccgccgtcgtgcttgccatgagaaccgtccttatctccaatgcgcttggcattgcttccggatcgcactggtagcggtaagcggggcgggtctcaagacctcgatgattttgcttatttgctgaggtctggcttagtaagagaccatgaatgatttcacccaagcgctggaactggctgccggcctgatcggccactttgatccggagctacgccagatcgtcggcctgtcgcttggcgtcagcctgacggcgagcctcgttgccttcgcgatcggggcgccgatgggcacagcgctggccatctaccggatccggggcagggttgcgttgatcgtcgtcgtcaatgcgctgttggggttgccgccggtggtggtgggacttgccgtgtacctgctgctgtcccgatcggggccgttgggggcgctggggattctgtttacgccgaccgccatggtgatcgcgcaggccattctcggcattccgatcgtcattgcgctggtgcaccggacgatggtgggtgtctgggctcgttacggcgatgcccttctcgtcgacggcgcctcgcgcttgcgtgccacctggacgctcatggctatcggacgcgacgggctattgaccgcgtttctcgcggctttcggccgggcgatcgcagaggtcggcgcgatcatcatcgtcggcggcaacgtgcgcgggcatacccgcaccatgaccacagccatcgcattggagacgagcaagggagagctaagccttgcgctggcgcttggcatcatcctcgtcatcctgtcgatgaccgtgagcgcattgagcttcctgattggacgcatcttggccggtcgctgaagccccaaacaatatcgtcgttcaagggagatcgcccgcatgaagcactgcctcggctcactccgtatcctcgcaatcatcgcgcttgccgtgcttggcgggcagaccgtcacgcatccaacttgggcggaagatcagaccattgtcgtggcgtcgacgacgtccacccaggattccgggctgttcagctacctgctcccgatcgtcaagcagaagacgggcctcgaggtgaaggtgctggcacaaggcaccggtcaggcgctcgacaccgcgcgccgcggcgatgccgacgtcgtgttcgtgcatgcccgatcggctgaggagaagttccttgcggaggggtacggcgtgaaacgttatcccgtgatgtacaacgactttgtcgtcgtcggtccgaaggacgatccggcaggcatcaagggccagggtgtcctcgccgcgctgcaaaccatcaagaccagagccgcgccgttcgtctcccgtggcgatcattccggcacccatattgccgagctgaggctttggaaagaagccggcatcgacatcgcgaacgaccgcggctcctggtacaaggaaatcggccagggcatgggtgcggcgctgagcatggcctcggcgtcgagcgcctatttgctgtccgaccgcggcacgtggctggcgttccagaatcgcggcgacgtgacagttctggtcgaaagcgacaagcggctgttcaatcagtacggcgtgatgctggtaaatccggccaagcatcccacggtgaagaaggaagccggccagcgcttcatcgactttctgatttcgccggaaggacagagcgcgatcgccggctacaagatcaacggccagcagctattctatcccaatgcgaacgatcccaatgcttgaaggaagcagcccggtcgcgttccctgagcatgcgccgagcccgccctactgcggggacatagcctcagagcggccgcctggccttacggatcggccaccggcagcttgacggtcacgcgcaggcccgagcgtccggcgccggtcacattctcgaacaggatcgaacccgtggcacgatccacaatccgcttcacgatcgagagcccgagcccggccccctcgccgctcggctggccgccgcgaaagaacggctcgcctatctgcgccagatcctgcggcggaatccccggcccggtgtcctcgatctggatgaccgccatggcgtcctcgcgatggacgctgagatcgacggcgccgccattgggcgtgaacttgatcgcgttctcgaccaggttccggaccgccgaggtcagggacatcggatcaccgttcacggcgaccgcctcgacggtcgtgaaaccgagatcgatgttgcgagccgccgcctccggcagcagatcggcgacgacaccctttgcgatcttgtccaattccaccgcggcgcttacggcagatggcgcagcgtcttgacgcgccagcgccaagagttgctcgaggagatgcctggtgcgccgcatgccgctcttcaacgcatcgagccgctcgcgcgtctccgcgggcatgtcgagcgaggcaaggttttccgcctgcaggctgagcgcggtgaccggcgttcgaagttcatgggccgcgtcggcgatgaagcgccgttgctgatccatcatgacgcgcgtccgcccgagtaatccgttgatcgagccaaggaacggccggagctcgcttggcgtgccggttgcgggcagcgcgccgatgtcgtccaccctgccggcgtcgagatcgccggcgaggcgcaacatcgggcggaacgatcgggcgatcaccaatgcggtcatcagcagcaggcacggcaccagcgcggcgatcggcaacagcgtgcgcaccgccatgtctcctgcgatctcggtgcggatctcggtctgctgcgtcaccgcaaagcggctgccgtccgaccgcgtccgaagcagcgcgcggaccggctgtccgtgatagacgtcattgtgcagcccatccgtcaggccccacagccggcgatcgtcagtggcgccgcgcggcgcctcgcccaactcgacgacggcgacctcggcttccgcatcgacaccggtgaccgggcggctttgccggagcggagcgctcagcgcgaagctgccgatctggatcaggacggagtcctgcatctcgatcgcttcgctgtaggcccatcggtacgccaggattccgccgacggcgcccgtcagcagaatgatcgccgtgagtccaacgaacaggcgcccgcgcagcgatcccatcatctcgaacgatccaccatccatccgacgccgcgcacgttcctgatcgctgacgcgccgagctttctgcgcaccgcgtggatcaggaactcgactgcgttgctctcgacctcctcgctccagccatagatctggcgttcgagctcggcacgggacaggatcgttcccggccggttcaagagcgcctgaagcagggcaaactcgcgggcgctgagcacggctttttctccaccgaaggcggcctcccgcgttgccgggtccagttgcagctcgccattggtcagcaccggcgccgatccgctgccctcgcgccgcaacaccgcacgcatgcgcgccagcaattccgcgatctcaaacggcttgaccaggtagtcgtcggcgccgagatcgagtccccggatgcgatcgtcaagcgcgtcgcgcgcggtgagaatgatgacgggcaggcgcatcgaggccgcacggatcgccttgaggacgtcgaggccgtcggtcaacggcagtccgaggtcgagcagtgcgatatcgtaggtctcgctgcggctggcttcgacggcgagatcgccatcgcgcacccagtcgacggcataggcggcatcccgcaccgcctcgacgacggcggcgccgatcatcctgtcgtcctcgaccaagagcacccgcatcgcccgtccgtccatcccgatccgtgccggagctccacccggcgaaactgcttcgtatcgcgcaacccgcgacacaagcgcgatcatatcagcttcgacttagccggaacttagggctttcggcgcctgcgtggcggccacgcggcccggctaagccggagctaagtctcgtagggcacgctccgtgtcgaatccggcggaaccgccggcgatcccacagcggagttcaccaccgtgcaggttacccgacgcatcggccgcagcatgctgaacaaggtccccgaagtcaccctcgtgttctggctgatcaagatcatgtcgaccacggtcggcgagaccggcgccgattatctcgccgtccatgtcggccttggcacaagcgtgaccggcctgatcatggcggccctgcttgcggccgtgctggctgtccagctgcggatgggccgatacgtgccatgggtctactggctgacggtcgtgctcgtcagcatcgtcggcacgcagatcaccgatgcgctgaccgacaagctcgagatcagcctctacgtcagcacggcgctgttcgcgaccgcgctggcggcgacctttgcgatctggttcgcggtcgagcggacattgtcgatccacagcatcgtgaccacgcggcgcgaattgttctactgggcggcgatcctgttcaccttcgcgctcgggaccgccgcgggcgaccttgccaccgaagcgctgggcctcggcttcaacgtcggcgtcgtggtgttcatggcgctgatcgcaggcgtcactgctgcctacgcgctcggcgccaacgaggtgctggcgttctggatcgcctacatcctgacccggccgctcggcgcctcgttcggcgacatgctgtcgcaatcccgcgactatggcggcctcggcttcggcacgatctacaccagcctcgccttcctcgcggtgatcgccgcgctggtcggctggctctcgttcgcagacggcagcgagcgaacccccgaagcatcaccccgcgcatgagttcgccgcccgtccaagaggtcgtccgccgaagcaaccctaacaggagaaccacaatgaacagaacgatcctcgcacttgccgcaatccacgctctcgtggtgacttcaccatttccgcatgcgagcggaggcctgaccctgctgccacgcgcgcaagccgccgcctccaaactcggcgacctgacgccgttccgcagcatcgccgccgatgtcgcagcacttgtcgacaagggagacctcgccggcgccaagacgcggatcaaggatctcgaaaccaaatgggacgaagcggaagccggcttgaagccgcgcgcggccgcggactggcacacggtcgacaaggcgatcgatcgcgcgctcgaggcggtgcgtgagaccaatccggacgccgccaaatgcaggaaggcgctcgccgagttgctctcgatcatggaccagatgaaggcctgatcccgtcgtccatcatttgaccacccgccggcggcatcgaccgccggcggtgtatctcgaagtgacgaatcttggagtgaccaccccatggatatgctgctcgacaacaccaccgcggagcgcacgggcaaggttcccgccgtcacgctgggcttctggatcatcaagattctcgccacgacgctcggccaaaccggcggcgatgcggtcacgatgtcgatgaatctcggttatctcgtcggcaccgcgatcttcgttgcgatcgcggccctggtcttcgcgctgccgcagcgggcgggcaagcacgcgtgagcttgttcaggccttgttcggcgtgaagatcaccttgcccttgaatgccgccgccttcgcaatggcttccgcaaatccctcgaggccatagctcccgaccaccggggcgctgatcgcccctgaggcaaccatcggcacgagatggtcgtacatcgtggccagcgcctcgtcggtcgcagtcttgccccagtgggcgagccagaaaccgcgcacggacacctcgttgaagatcacgctcaaggccgagccggagaacggctgtccgctcatcgcgctgtagatgacgagcacacccttcggcgccaggcagttcatcaggttcaaggccgacgcgccgccgacgacgtcgagcgccaactggatcggcgccttgccggtctccttggcgacgcgtttggcaagatccggcccgtcgaccagcacgatatcgccgccgaccgccttgacttcatccacgacttcctcgcggcggacgatgttgaccgtcttgagcccaagcgacctggcgatggcgatcaccgcgcgcgccgtcgccgaattggcgccgttttgaatcacccagccgccgcgcgggattttgacgaaatcggtcagcagcagataggcggtcgccggattgaccgcgatcatcgatagctgctggatgtcggcagcttcgggcaacggacgctgccaggacggcgtgaacttgagccgttcggtccaggtcgggatcgtgaacgggatcagcgtgcggtcaccttccctgaggttcttgacctgcgcgcccgcagcgatgacgcgcccgacaccctcgatcccgagtgtcgccggcggcgtcggcaggtaaccgtagcgccctgcgatgatcatgaagtccgagttgttgatcggcgcggcctcgaccgcgaccaccacctcgttcggcccggggctgccgacatcgggcacctcgttgagtctcaccgcttccgccggacgtccgaacgcaaccacctgaaccgccttcatggcactatctcccgattttattctatacttgtaagtacagaatatgggcaacgtcaatgactggatttgccttcacggtaaggtgaaggcttcacatcggacgcgggagtacataaaacagcaccatggcaaggccgcgcagtttcgatccggacgacgtcctggagatcgcccgccaggtattctggcagaaggggtttcaggcgacctcgctcgacgagatcacggcggcgagcgggatcgcgaagccgagcctttatgcagcgttcggcgacaagcacgcgctgttcctgcgggtgctggaccgctatcacgacggcatcctcggctgggccgagcgcgtgctggcgcagccggggccggcccgggaggcgatcaggcagtggctgaccggcttcatcccgtattgctcgggcgagaaggggcagcgcggctgcctgtcgatcaattcggcgaccgacggctcgctcgatcaggccgcgctccgcaagagcatcgagcgctacaaccggcggctcgaggagctgttgcgcacgcggctgcgcgccgaccgcgcccagttcaagaagggcttcgatcccgacgtcaccgcgcacacggtcatggtggtgcatgccggactgatggcgctcgcgcaccagacgccggattcgaagcaggtgaaggccgtgatcgaccaggtgctgggcctgctcgcctgaatcgtgaggcgatttgaagcgcccggccggtcagagatcgagctggatccgctcctcgccttccgcttccggcttcgccggcacggcgcagcagatcagcacctcgtcatcggccaccgcggcggtcggctgcttctgataggtcacggcacccgccagcagtttcgtccggcatgttccgcaattgccttcccggcaactgaaggcaggactgaggccgcgtgcttccgccagttcgagcagcgttccggattccggcgtccagcgcgcttccttcagcgatgcggtgaaggcgaccgggaccggcgcggtcgcggccggccggcgcggcgacaccggcgcggccacgtccggcgtcctggccagcgaggatggcccgaatgcctcggcgtgaatccggcgatcggcaatgttgtagtcgcgcagggcttcatagagcgattgggtgaactgcggcggcccgcacagatagaaatcgtagtcgttgaacggcaggacacgcgacagcagcgccatgtcgatccgccccgcggcgtcgtaatccgtgccttgttcggcgccatcgacgtcgctgagcacgcggatgatccggaccgcgccgccggcggccgcagccagttgctgcaattcgtcgccgaacgcacgttccgccttggcatgcgcggcctggaacaggaagatcggccggatgccgcgggtgcgcagcccctcatagaccacgtggcgcagcatcgcgagcagcggcgtgatgccgacgccgccggcgagcagcaccgccggccgcttctcgcgcgcatcgatcgtgaaaccaccggccggcgcgcgcgcctcgatgatgtcgccgacacggatggcgtcgtgcagatgctgcgacacaacgccgtcacgcttcacgctgatgcggtacatgccgtccgacggcgcgaccgacaatgtataggtgcggatggtcggcttgtcggcgttggggagcgcgatgcggatcggcaaatgctgtcccgcccggtgcggcagccgccccgcgccgtcgtccggctgcagatgaaacgagcggatcgagcggctctcgtcgacgattctggcgaccttgaagggacgccactgcgtcgcaagctcggctgcgcggatgcgatctgcggcctgcgcccagtcgccggtcatcaatgcattcggcgaccagccttcggcgcggaacgcccagcgcagcggcaacgcgccgcgcctgcgcaccacacggcgggcccgaaaactccacagccgttcggcaccctggaacgccgcgatctcgggcgaatccaggatcacttcggcatcgccggtcagttgcagcatgtcgccggtttcgaaatcgacgaaggccagtccagccttgccgttgacgaggatgttgccgagcgtgttgaagaacaggtttccggcgaaatccggaatggtgagcgtgccgtcggcggcgacgcgaacgaagcctgctctgccgccgcgatgcgagacgtcgacctggcgacggtcctcgcgctcggcataggacgccacgaagaacgtatctgccgcctggatcatgtcgcgcgcggcctgatcgagcgccgtgttcgtctcgatttcgccggtgaacggctgatccggctcgcgcacgaaagcgaaatcgcggagctggatgtattgcgggcagttgccgaagctctgatcgagttcgaagctcagcgcctggccggacgatgcacggagcagcccgttggcgcggttgcgccgccgcgtgtgcagctcgatgcccagcaacgcgacggcatcgctctcgcgcatgccttcactgacgggatcgcttggatcaggccgtgcagcgatctcgaggctgcgcgatgtcggcgaggcgatgaagccgggccggccggccagcaaggaggcccacgcgtcgccgctccggtccacgctgccgaccacgatgaaaggaatctgcgcaaagaaatcgcgatgctggtcgggcatgtaatcgcgcaccgcgcgctggccgaccgcctccatcttctcggcgacgccgacccgctgctggatcgccttctcgccggcatgccaggccgcgagcttgctcatggttcgcctgtcgctcattgccttgccctccctttcgggcttgcacgggcgcgccctgggacgcgcccgctcagcacatcacgcagctttggacagaccgacgcgggtcttggcaaagggcacgaagcccggcagcgcctcgatccggcgcaggaacgcgttgacgtgcggataggcggagagatcgacattgccttccggcgcgctcgacaaatagctgtagagtgcgacgtcggcgatggtcggctgcgcgccaaccagccagtcgcgatcggcgagatgagcctcgagccgcttcagcatcacatgggcgcgcgcgatcacgtcgtccggattgaacttcgcgccgaacacggtgatgagccgcgccgcggcggcaccaaaggcgagatcgccggcggcgaccgagagccagcgctgcaccgtcgcggcgcccttcgcatcctggggcagccagtcggtgcggccgaacttggtcgcgaggtagaccaggatcgcgttggaatccgcgatgatcgtgccgtcgtcgtcaagcaccggcacctggccgaacggattgagcgccaggaattccgccgtcttgtgtgctccggacccgaggtcgacctcgaccaactcatgcggaattccgagcagggagatgaacaggcgggcgcgatgtgcgtgaccggagagcgcgaagtgatagagcttcatggtgccgttcctcatgtcgtggacggggccattcccgaccgcgacctcaaggtggctcattgcatcgatgattataatgaccgtcgtaggaacttcattattgcaaatatcgcaataacggtcaaacctcgacgatcacgtaattgtcctcgatgtgcaccggaaacgtctcggcgacgtaagggcccttctgcaactccgcgccgctttcgaccgcgaccggataggagcggatcctgaaccgcttcgggtcgaaccaggattggccgttgcggatgtcgaactcccagccgtgccacggacagcgcagcatctcgccgacacggtcgcgctgatagatgccgggctccggcgaggtcaggcgcgcgacgcaggcggccttctccagcggcgcgccttcatgcgggcagcggttgagcagcgcgaagaactcgccgttgacgtggaacacgacgatgtcgcggccctcgatgccgaacaccttgttgccgccggcaggtatttcgctggtgcgcgcgacgatgtgacgggtcatctcagtcctagaatttgtaaaccgcacgcgcgttgctgttgaagatcttgcgccgttcggcgtccgtcagcggcgtcttgaaggcgtagcgggcgtcgtcatagtcccagtgcggatagtccgacgagaacagcagacggtcgatgccgacccactcgatcagctgacgcaggtgcttggcttcatcgggctcgtcgatcggctgggtcgtgaaccagaagctctccttcacatattcgctcggcctgcgcttcagatgcggcacctcgctgcggaagcgttcgaagtgctggtccatccgccacatcgtcgcggggatccagccgaagccgccctcgatgaacacgatcttcaatttcgggaagcgctcgggaacgccttccagcaccaggctcgtgaggttcgaggccacggtgtgcgcgttggactggtgctcttcgcagtaataggacggccagccgccgccggtcggcgcgtgcccgccatagccgccgacatggatgccgagcggcagatcgagcgcctgcgcgcgctcgtagatcggccagtagcggcggcggccgagcggctcgttggcgcgcggcgagacgttgatctggatgtattcgcctgatttggcgcagcgctcgatctcggcaagaccgaggtcggagccgtcctgcccgaccaggatcgatgccttcagcctgggatcgcgatgcgcccagaacgccagctgccagtcgttgatggcgcgctggatcgcggcgccgaactccaggttctgctgcgagaagatgaagagatcgagcacctgcaaaatgccgaactcgacatcaaacggatcgaggtgctgcttgcgcatgaaatcgagatcggagccgggcacgccgccggtcggcggccaggcatcgcgccgcgcgatcagcggcgaggagcgcggatacggcgtggtgccgatatagggcgtacgcaaatggctgccgtattccttgagatgctgctgccagcgcttcggcaggaactcgttgaggtcgctatgcgaatggatgctcggatggatgtcgcaatcgatgatcttcagccgtgtcgcagcggtcgtttcctggtcgagcatcgggcggtcgatgacgtcactcatgcgatcctccattgaattgagccggtgtggccgtcacctctccccatcggggagaggtcggattgcatcgccagatgcaatccgggtgagggccttgcggtccctcgcgagacttgcgccccctcacccggcgctgcgcgccgacctctccccggtggggagaggtgtggcactgccgatgtgatgtcgagcttcgtcatggtcaggcgtcgagcttcagacgcggaaaggtttccagcggattgtcttcgcacatccgctggacgaggctcttgggcagatgcggcgggaccggatcgtcgccgtcgaactgccaatgcggatagtcggatgcgaacaggaacatcttgtcggagccgatctggtcgatgatgtcggcaacacccgtcgcatccagcggcgcgtcgaacggctgcatggtgacccggaaatgctcgcggatgatcgcggccggctcgcgctcgacccatggcacctcgacgcgcacgccgcgccaggtcttgttggcgcgccacatgaaggcgggcagccagctgacgcccgactccatcagcaccacggtcaatccggggtacttcccgaacacgccctcatagatcaggctcagcgtctgcgcctggaacgcctgcgcctcggcgagataatattcgtagcgataggacggccagccgatcgagctcggcgcaccgcgataggcgctgccggcgtggatcgcgatcggcagcctgtatttctccgcggcctgatagatcggccagtaatgccgccgcccgagcagcatctcgccctgcgacggcacgagcacggagacaaatcggttatcgccggcgcggcgctcgatctcctcgaccgcaagatccggtgcctggatcggcaccacgatcgaggcgcgcagccgcgagtccctggcaagccactccgccgcgatccagtcgttgatcgccttgcagaagtccgccgccatataggaatcgaacaccgcctgcgcgccatagacgacgttgcagatcgcgtggctggcgccgagctggtcgaacgcgccgcgctgcaccatggcaagatcgctgccgggcttgctgccgtcggccggccgccaatcggcacggcccgacagcggcatcgacggcggataggaattgaggtcgagcccgtcgatggcgcggctgaccacctgttccttccagtgatcgctcagatagggcagcagcgtggtgcgcgttccccccaccgcgggatggatgtcgcaatcgatgcgcgtggccgccatggcgttccccggattgaccttcttgtcgtcgttgttggcggcatcgctgccgcagacgggactgtgacgccgatggcgcgatcgtgcaagccggtccacgcgggtccgccctgccccatgcgcgcagcggcctcacgcgaagttgcgggacggcgtgtgaagggcgtcacccaccccgaccacaggacgtgctagcgatttcgcgctgcggaaagcgcgctgacaggagactggaatgagactgggccgactgacgatcctcgcatgttcattgtcgctggcctcgcccgccgcgtgggctgcgcccgcgatcgcgtccggctcggtcgcgctggcgctcgcgggcgtggtggcgcccacctcggcgctgccggccaaggagaagaaggcggtcgccgctttcttcaacggcgacagcaacgtccacgtcaccaggaagatcaccgtcaccgccgacaaggtcgtctgccgcgccagcaatgtcgacatcacctcgcgttcctgcgtgctgaccttcggcagcaggacccacaccgtgaagggcagcgaggccaacgcgatctacgccaccattgcgctcgccggcgtgcccggcgacggcgccgccgggacgatctacgaggcgctgtcgaaactgtcctgcactcttgatccccaggtgatcaaggacaaggccggcggcggcgccgactgcagcttcgagccgggcaattagagcgttttccagcgaagtggacaccggttcgcgtgaagaaaacgcgccagaacaagaatctagaaccccgttccgattcaatcggaacggggttctagcccgcgcgctcggactccggcacgatcacgcccaaccgggcggccgcgcggcgcgcggtctcttcccgttgcgccgtgatcgcgtgtgtcgcctcgcgcgtccgctgcaggatctcgggtggtgccgtctccggcgtgccactgtcgaacggcggttccggcgcataggccatgtagagctggatcgcccgcgccgcgtcgtcgccgcgcagttcggccgcgagccgcaacgcgccatcgatgcctgcagtgaccccggcggcgaacacaaagcttccatcgatcacgacgcgctcgttgaccggagtggccccgaagtacggcagcagatgcagcgacgcccaatgcgtcgtcgccctgcgtcccttcaacaggcccgccgcgccgcacagcaatgcaccggtgcagaccgaaaaaatacggcaagcccccgccgcctgctggcggatccagccgagtacctccgcatcctccatcagggcttcctgaccgaagccgcccggcacatgcagcacatcgagcggcggcgcctcggccagcgtcgcatccggcgtcaggcgcaaacccttgaggtcgcgcaccggttccatggtcttggcgtagatgcggtaggtcgaattcggaatccgtgacagcacttcgaaaggaccggtcaagtcgatctggtcgacgccttcgaacagcagcgatccgatccgcaggtggacatcatgggcaatcatcgggctctccttgcactatggacaaagcaaacctagcgcggcacgcttcggcgatgacgccaaagcccccacattctccgccaagcaaccggcgcgtgatcgaagtgctggcctatccagcggtgcaactgctcgacgtcaccgggccgttgcaggtgttcgcgtcggccaacgcgctgacggccagggcaggcaacgccgagccctacgacgtccgcgtcgttgccaaggacggcccgacggtcgaggcgtcggccggcgttgggatcgcggtgcatccgttacccgccatcggtaccgcggtcgacacgctggtgattcctggcggcgatggcgtcaacgccgcatcgtccgatcgcatcctggtggattgggtgcgcaagcgtagcgcagacgcccgccgcaccgcatcggtctgcaccggcgcgttcctgctcgccgcgtcaggcgcgctcgacggccgtcgcgccgtgacacattggggattttgggaagagctcgccgcgcgctttcccgacgtccgggtcgagtccgatccgatcttcgtgcgcgacggaacgttctggacatcggccggcgtcacgtcgggcatcgatctcgctttggcgctggtcgaggatgatctcggccgcgcggcggcgcttgccgtcgcgcgctatctggtggtgtttctcaagcggcccggcgggcaggcgcaattcagcgagatcctgtcgctgcaaacggccgacgacaggttcagcgcgctgcatgactggatcagcagccatctggccgacgatctctcgcttcccacattggcgaaccaggccggcatgagcgagcgcagcttcagccggcactatgccgaggcgactgggttgacgccggcgcgcgcgatcgagcgcctgagggtcgagggtgcccggcacctgctctcggagacgcggctgccgatcaagcggatcgcccaacgctgcggcttcggctccgaggagaccatgcgccgcagcttcctgcgattgctggccaccacgccgcaggactaccgcgcgaggtttgcgggccaggcatgatggaattgggtcgaacctggatcggcagcggaagttcacctctccccaatggggagaggtgaagcgagcgcgcatggccggcgcgcaatgtctgatactcagccgttccaggcatgcgcctgcaaccccgcttccagcggcggattggtcacgctgccggtgtagttcgtgatggtcgacgccgccacgatggtgatcacctcgagcagcagctccttgctgaacccggccgccaggaacgtctcggtgtcctgctcgtcgagccgcccgcgcttttcgatcaatgtccgtgccagcgtcgagagcgcgccgagctgcttgtccgcaggcgagcgtccggcccgcatcgcctcgacgtcggccggatcgagaccggcctgcaagccgagcacggaatgcagtgcgaccgcccagctacagcgattggtcaccgcgtcggtgagcagcacggtctggatctgcggctcggcgaaactgccgccatggaccttgtcgaagatgccgatgaagctctggatcagcacgggcgacgtcgccatcgccgccgcaaggttggggatcatgccaaatcgcgcctcggcgtcgcgcagcgagggcttcgaggcttccggggcggtatcgagcgtatggacaggaaaacgtgtcatgggaactgcctttcactgtgatgattgaacccgcgcagtttccgaagctgagctgatgccatcagccgaacatcaagcgggttcgatgcgcgtgatctagccccgcgacgcaatccggtcccgccaaagtccccacattccgcgccattcgaacgtggcagccgagccggcggcgatttccggccatttcgcgcaacaccgatggcgcggccggcgacccgttccctccgataaggccgactttttttgatctggatcatggaggctgcagcgcggacagcgcaatagagcccgagtaccccggccaaggggctgtctcaacgggaagaacaccagggatcatgatgtgagcaacaatctcgcagggatcgaacgcgatccgaactaccaggagctcgtgcgccggcgttcgtcgctcggttggatgctgtcgctgatgatgctgatcgtctatttcggcttcatcctgctgatcgcctacgctcccaagtttctcggcacaccgctcggcagcggcgtgacaacgatcggcataccgatcggactgtccgtcatcgtgctcgccttcgtgctgaccggcatctatgtgcgccgggcgaactccagctatgacggactcattcgcaagatcatcgaggagaaccgctgatgaaaaagctctcctggttgctggcaatcctgctcgcgagcgtgcccacgctcgctcttgcagcgggtaccgtcgagggcggcgccaagcaggcgatcaactgggcggcgatcggcatgttcgtcggatttgtcggcctcacgctcgtcatcacctattgggccgcaaagcggaccgcatcggcggccgacttctattccgcaggcggcggaatcaccggctttcagaatggccttgcgatcgccggcgactatatgtctgcggcctcgttccttggcatctcgggcctcgtctacacctcgggttacgacggcctgatctactcggtcggctggctggtgggatggccgatcgtcaccttcctgatcgccgagcagctgcgcaacctcggcaagttcacctttgccgacgtgacgtcgtttcggctcgggcaaaccgacatccgcatcctggcggcatgcggctcgctggtgaccgtcgcgttctatctgatcgcccagatggtcggggccggcaagctgatccagttgctgttcggcctcgactactggatcgcagtcgtcctggtcggcggcctgatgatggtctacgtgacgttcggcggcatgaaggcgacgacatgggtgcagatcatcaaggcggtgctgctgctctcgggcgcgacgttcatggccggagccgtcctctataaatacggcttcagcccggaagcgctgttcgccaaggcaacccaagtgcatcccaagaagctcgcgatcatggagcccggcagcctgatttccaatccgctgtcggcaatctcgctgggcctggcgctgatgttcggaacggcagggctgcctcacatcctgatgcgcttcttcaccgtcaaggacgcccaggccgcgcgcaaatcggtgttctacgccaccggcttcatcggctatttctatatcctgaccttcatcatcggcttcggcgcgatcaccctggtgtcgaccgacgcgatgttcctggacgggagcatcctcgagaagaccaagagcggaatcgcggcaatcaagggcggctccaacatggcggcgattcacctcgccaacgccgtcggcggcaacctgtttcttggcttcatttccgccgtcgccttcgccaccatcctcgcggtggtgtcggggttggccctcgccggggcatcatccatcagccacgacctctatggcatggtgatcaagggcggcaatgccaacgagcaggatgagattcgcgtctcgaaggtcgcgacgctggtgcttggcgtactggcgattttcctcggtatcgtgttcgagaaccagaatgtcgccttcatggtgggcctcgccttcgccattgcggcatcctgcaatttcccggtgctcgtgatgtcgatcttctggaaaggactgacgacgcggggcgcgctgatcggcggattcctgggcctgatcagtgccgtcgtcggcgtcgttctctcgccggcggtctgggaggtgaccttgggattcgccaagggatcggcaccggtcaagctggacaatccggcgctgttctcgatggcgctggcatttgccggcatctggctggtctccacactggatcgcagcaagcgcggcgcgatcgaccgtagcggcttcgatgcacaatatgtccgcagccagaccggcatcggagcagcctcggcgacgacgcactagagcaggcttgaacaaccgcgcttcggcaccggacgggtcgcgtggaccggccggtgccgcctttccaaggtcaaccgtcaggtcgtccacgctgtccgcatccccggaagaccgcaatgcccaaggcattcgacatcagcaacccgccgttcgatcgtctgacgccgcacgagggcgagacgttgcgggcgtcgctcgatatcgtatacttcagtccgggtgagacgatcatcggcagcgacgccccggccgacgcgctctatgtcgtgatcaagggcacagtcgaggagcgcagcgaggccgccctgctcgcattgctcggccccaaggacactttcgacagccgcgcgctggttcacggcgagagcgagcatcagtttctcgcccgcgacgaaacgctttgctacgtgatccccagggccgtcgcgctcaacctgatcagggccaacccacgatttgcagcattcttctaccgcgacatctcccggaagctcgatgaactcgccaacgacgaggaagcgaaacgttacggctcgctgatgcacgccaaggtcagcgagctgttcctccatcctccggcattggtggctgcgagcgacacgattgaagctgccggtcacctgatgcacaagatcgacagcaacgcgctgttcgtgcgcagtggcgagcggatcggcatcatcacgggcatgaacctgtccaaggccgcggtgttacggcgtaagccgatcgaaacgccggtcggcgagtttgccaatttcgacatcgtgtcggtcaggccggacgatttcgtctcctcggcgctgctgctcatgacgaagtacaacaagcggcgccttgccgtgcgcgatggcgaacagttcgtcggcattctcgaagacatcgaccttctcggattcctggcaagcagcgcccaggtcgtcgccggccgcatcgatcgcgcctccagcccgcaggatctggcgatcgctgcgcgcgagatcgaggcgcaaacgcgggcactgcgaagacagggcgtcaaggtggaggtgatcgcggagatcgcctccgacctcaaccggcgcctgctgtccagactgttcgaaatgatcgcgcctgccgagttgcgaaccagcggctgtctgatcgtcatgggcagcgagggacgcggcgagcagaccacacgcaccgaccaggacaacggccttatcctggccggtccggtccgaagcgaaatccttcagccgttccgcagcgaattctccacgactctggagagcttcggctttccgccctgtcccggcgagatcatggtgcgcaatccggcgtggtcgaagccgctctcggactatctcgcggatttccgccgatggatcgtgcttcccgaccagaccgcgcatatgaacgtggcgatcatctatgacgcgcaggcgatcgcggggaacgcgcaactgctcgacagcgccaaggcggcgctgatcgacatggtccggggcgaacaggcgttcctcgcccacttcgcccgcgcaatcgacgcctttgaaaccccgatcggcctgttcaacaacctgattacctccgagggcacgggagacgcacttgacctcaagaaaggcggcatctttcccgtcgtgcacggcgtccgcagcctggcgctcgaacagggcctgcgcgagacctccaccgacaagcggatcgcgcggctatgcgagctgggcgtactgcgaaccgacctcggacgcgatttgaatcaggccttccgcttcctgctgacgcttcggctcgacgggcaactcgccgcatccgcgggcgtatcggggaccttggtgagaccggcacagctgtccagcattgaacgccacctgctgcgcgacgcgctccaggtggtcaagcaattccgcgacattgtccgccatcatttcaaactcggcatgttctaaaatgctgccccgtgcgatcaagcggctgctgcatcaggcgaccctgagcgaccagtcgtatcgcttcatgttcggccgggctccggacgacgagtttgtcgtgatcgattgcgagaccaccggtctcaacgtgcgcaaggacgacgtcgtggccattgctgcaatcaagatccgcggcaatcggattctgaccagcgagcatttcgaagtcgtgatccaccccgacagcgagatgggcgcggaatccatcaagatccaccgcctgcgccggtccgacgtcgaggcagcgccgatcgtctggaaggtcctgccgagtttcctgcgctttatcggtccgcgcccgctggtcggctactatgtcgacttcgacatcgccatgctggacaagtacgtccttccgctggtgggaatcgagctgcccaacgaccgcatcgaggtttcacggctctactacgaacgcaaatatggcggcgcgcctcccaacacgtcgatcgacctctccttcgccgcgatcctgcgcgatctcggcattccgccgcttggacagcatgatgccttcaacgacgcattgatgactgcgatgatgttcgtgcagttgcgtgatctggccgggcgcggcgtgcgtatcccgcggcaacggtccggaccggccttcaaccccatgggggcgtgacggcgcagcgcgctaagtttcggcgcggtccttgacccgccgcgtcacgatggcgagcaggcggccgagcgtgccgccggcggggcctttcttgcgcgccagcgcgagcggggcgaccaggcccgtggcacggtcgaggcggagataggagacgcctgcggtctcgagccgcgccatcgattccggcacgatcgaaatcccgagcccggcggcgacgaggctgagcgtcgacaccatccgcgtcgcctcctgcgcgaccttcgggctgaagcccgccgcgcggcaggcggcgatgatgctgtcgtagaggcccggcccggtcgggcggcggtagaggatcagcggctcgtcggcgagcgaagccagcgaaatccggcgccgcgtgtccttgcgggcgcgcgcatgatggtcgggcaacgcgaccagcatctcctcgtcgagcagatgcgtgatcgtgagattctccagccgctcgctcggcgagcgcacgaacgccgcatcgagccggtccgcctcgacggcttcgatcagctcgccggtcgaggcctcctccagcgacaatctgatcgccggcgcgcgctcgcgcatttcgcgcatcacgccggtgacgaagggatggaaggccgccgacgaggtgaagccgatcgcaagctggccctcctggccgcggctggcgcggcgcgcggcttccacggcgaggtcggtgtcgcgcaggatcgcgcgtgccttctccacgaaggcgcggccggcggctgtcagttcgaccccgcgcggctgccggcgaaacagcggcgcgccgatcgcggcctccagcgcccggatctgctggctcagcggcggctgctggatgccgaggcgagcggcagcgcgggtgatatggccttcctcggcgaccgcgacggcatagcggagatggcgcagctcgatcataggaccgatccatatacagcagatatgataattcaatgatccatatatttgatatttggagcatcgcaaactaggttcgggtcgaacacgacaagaaacggagccgacgcgccgatggatgcagcccccgccaccctcaccaccaagcacgaggcgcccgatatcggcgagttgttcgcgggcttcttcatcctcggactgaccggcttcggcggcgtgctgcccttggcgcgccacatgatggtggagaagcgcggctggctcaccggcgccgagttcaccgacctgctcgggctctgccagttcctgcccggcggcaacatcatcaacatgtcggtcgcggtcgggctgaagtttcgcggcattcccggcgccttcgcctcgatcatcgggctgatcgcggtgccgaccgccgtcgtgatcggccttggcatgatctacgcccgtttcgccgacgacctcgtcgtgcgccatctgttcggcggcctcgccgcagccgcagccgggcttttgatctccaccgcgatcaagatcgcctggccgctgcgccgcgatgtgctcggcctcgtcatcggcgcgctctgcgtgctcgcgatcgcggtgctccggctgccgctgctgccgacgctgctgacactggcgccgctcagcatcttgctgcgcgcgaggcaggcatcatgactgcaaccctcgtcacgctcgcactgatcttcgccgagctctccctactggccttcggcggcggcaacaccatcctgcccgagatgcagcgtcaggtggtcgacatccatcactggatgacggcgcaggaattcggcgcgcttttcgcgctggcgcaggccgcgcccgggccgaacatgatggtggtgccgctggtcggctggcatgtcgcgggcttctccggcgtgctggtgacctcgctcgccaagttcggtccgtcgtcgctggtcaccggctttgcactgcggctctgggagcgcttcaaggaccgaccctggcggcgcaccgtgcaggccgggctggtcccagtcaccgccggcctcgtcaccgccagcgccatcatcataacccacgcctctgcctcgagctggggcacgatcctgatcgcggccagcgtcgcgatcgccaccaccacgacccgcatccatccgctgctcgcgctcgccgcaggtgctgcgctcggcctcaccggcatcggccagccctgacgtgcggcgcgtgcgcgctttcgccgcaatggatgcgacggcacgagcggctatgttgatgctgccatgatcgacatgctgagcatcgacacccgcattgcgcgcctcggattgcgcgccggacgtctgcacgcaggcaattagccggccggcgatcgcgcgccgtccggattccttagacgtcatcaacaccatttcaatccgtcgtgtcgcgcgaagtattcgcgcgccggcgctgttgcgccttcgatcaaccgcaaggtcaaaccgacatgccccagagcattcagaaccgcttttccgccgcggccttgccgccgatcgtgatcaccgcgagcgaggcgcatcgcctcagcgcgctggccgattccagcatggcggtgtttccgcgcgtggcccagttcctcgcccgcgagaccgaccgcgcccaggtcgtcgccgacgatgccgacctgcacgacgtggtccgcatgggctcacgtgtgcgctaccgcgacgacgagaccggcgacgtcagggaagtcgtgctggtgtatccgcacgaagccgacatcgcgctccgccgcatctcggtgctgacgccggtcggcgccgcattgatcggattgtcggtcggtcaaaccatcgatttccagacgccgagccaccagacgcggtcggtgacgattttggccgttacgcatcaggactgacggcgcagcatcgcgatcctcgacacgcaccgcgtaagggagccaccagcagtcgggctccctccccccttgcggaggagggagcccgactggcgtgctcaccttacgttccgtcgatatcgtgatgccctcgccatcaacgcggctactccgcgccggagccgccctgcacgatcctctcgttcagcttctgatcgacggtctcgaccgtgcggtcgatctctgcgctggggttaccgagttggtgcgagatcaacttcaccaagaggtcgacgcgctcgatgaacggcgcgccggcggcgaccgcgcgggccgccgatgacggcttgagcagactttcggccgccttggcgtatttcgcgaacggcacctggtccgccgggtcggcgccgagcttgcgcgcgatgccgtcgacatgatcgtagatcgcctgcgagcgcgtgaggtcgccgtgcacggcgtcgcggatcgattgcggctcagtcggcgtgatgcagcggtaattgccggtcagcagcatcgaccacttcgccagcggcacgaacagcgagtcgaacactttcagcttcaccggcacgtcctggccgtcgagcgtcaccgcgtcgatgtcggcctcgagctcgcgcagcaccttgttgtgcttgtcgtcggcgaacacggcggccttgaagttggtcggcaggccgacatgcagcacgttggccttctcctccggcggacggaacgcctgtggatcgggcgagcacagcgtgacgaggcccggctcgaagcgctcccacacctgggcgttggtgtaggcctcctcgaggtccatgccggcgagcgcggggatccgcttcagatagggcagcggcggcatgttcatgatcgagaggcagggcagcttcgccgccgcgatcttgatcatcagcacgcgaacggtgtggttggtgtattgcggctcctgcatcgcaaggccgaccatgtcgtagcgcgacacgtcgacgtcggcgggcgtgacggcgtcgagcttgcccggcaggtcgcgcgagaagatcgagcgatgctccttctcatcacgcagcttgatgcgaacctcggtgccctcgcggttgatcaggtcggcggtgttcttgcggcacaccagcgacacgttgtgccccgccatcaaaagcttggtccccagcagggagccgtaggaagctccaaggatcagaatgttgcgcgccatgttctctccaaaagaccgctggtgtatggtatgccacggtctatcgcagatcgacaagcggctgccaaggggattatctcacgtgcggattttcgtgccgcgttcaggaagggcattcgagcttgcaagtcgccgccgatgtaacggaccgggctgaggaaatcctcgtctcagcttcccggctgtttgcccgccactcctatgcgaacgtgacgatggagcaggtcgcggcgtcggttcgggccgtgccgggcgcgctgtaccactatttccgcgacaaggaagatttgatcttccactgctatctgcggggactggcgatctatcggcacgagatcgaagccgccgccgagcccggcatcgacgggctcgagatcatcaggcgcttcgtgcgcggcaggctgcggcccgaaggccagcgcatgatcctgttcaccgatatcgatgcgctcgccgcgccctatagcagcgaggtccatgccaggcgctggcagaacgccgcgcggctggcggacatcctggaacgcggcgtggcggacggctcggtcgcctgcgacgagccgctgctgaccgcggtggcgctaatctccatcctggactgggtgccgttctggctgtccgaacgcgactactacacgcgccagcaggcgatcgacgccatcgacgacatcatcacgcacggcgtgtaccggcgcgagatcgcggttcccgagatgcccgaaccgctcagccttgcgccgttcctcgaggcccgcgcgaggctgaacaagcgggctgcgaagttcgacaggatgctgtcgatcgcctccgacagcttcaaccgcaggggcgtgtcgggcacgtcgctcgagagcatcgccgcggatgcgggcatgacccgcgccgggatctactatcacttcagtgaaaaggagagcctgctgctggcttgcctgcgacgcgggctcgccggcgaaatcgccattcacgagcacctgcaggagcacagcctcggcgccttcgaacacaccgttcagcggatccgcctgctgctgatgctgcacgacacgccctgcggaccgaaggcgacctatcacaacatcaactatctcaacgacgtggaccggaaggaatatgtccgacaggtgctggcgacgatccggcgagaccaggacagctatcaacgctggatcgacgagggccgcttccgtcgcatcgacagatatttcgccgagcggattttaaccggcatggggcattggtatccgatctggttcaagatcaggcgtgattggtctgccgtcgagatcgccgatcacttcgcgcggctcttcctctcgggcctcaagccgcgccggcggggttgaatcgccaattcgcgtcccgccgctataatgccgccggctcgtctggcggacgtcggacggcataggttccaaacgaactgccgaacgcctcatccaaaagtttacttgcggttcaaatctgcgccggatctcgcggcatctcgaaacatttatagcctataacattataatacctcgcgcgaaaacttgacgcagtattcaaagcgaaagttgcgaaggctcggcaattgaggctaagagacggcttcgatcgctgaagatcaagaaacacgagcaagggagaaagcaggatgcgtaagctgatcgttgctgccacggcagcactgacggtgttgggaggcgcggcgtccgcgcaggaatccatcaagatcggctacatcgatccgctctccggcggcggcgccagcgttggcgaaggcggcctgaagacgttccagtatctcgccgacgaattgaacgccaagggcggcatcctcggccacaaggtcgagatcgttccgctcgacaacaagaccaatccgcaggaaggcctggtgcaggcgcagaaggcggtcgacgccggcgtccgctacatcacccagggcaacggctcgtcggtcggcgctgcgctggaagacttcgtcaccaagaacaattcgcgcaaccccggcaaggaagtgctctacttcaactacgccgcggtcgatccgagcatgaccaacgagaagtgcagctactggcatttccgctgggatgcgaactcggacatcaagatggaagcgctgaccaactatatgaagggccaggcgtcgatcaagaaggtctatctgatcaacatggactactcgttcggccagtcggtgcgatcaacggcgcgcaagatgctgggcgaaaagcggtcggatatccagatcgtcggggacgagctgcatccgatgctcaaggtcaccgacttctcgccctacatcgccaagatcaaggcgtctggtgccgacaccgtcgtgaccggcaattggggccaggacttcgcactgctgctgaaggccgcggccgacgccggcctcaaggtcaactggtacacctattatgccggcggcgccggcggaccgaccgcgatcaagcagaccggcctcgagaaccaggtgttccagatcagcgaaggcgtgccgaactccggcaacaaggcggcgatggatttcgagaaggacttccgcgccaagaccggcatttccgtgtggtatccgcgcgcggtgaacgagatgcggatgttcaaggcagccgccgagaaagccaactcgatcgacccggtgaaggtcgcggccgcgctcgaagacttgaagttcgaggtgttcgacggcggcgagggcttcatgcgcaaggacgatcaccagttcttccagccgatctacatctcctcgttcggctcgctggccgacaagaccaaggagccgttcgacgaggagaacaccggctggggctggcacatcgtctccaagatcgataccgcccagaccatgcttccgaccacctgcaacatgaagcggccctgatcggccgcctcggaatgcgcctccgcgcccctccggggttgcggaggcgttcgtcatccggcagcgtcggtgccggacctcaattccttcgacaggtctttgatcacgtgaaccattggtctctcaagcgggtgcgccgtggctgagctcatcgtcatctcgacgctgaacggcgtcctgttcggcatgctgttgtttctgctgtccagcggactcaccgtcatcttcagcatgatgggcgtgctcaacttcgcgcatgccagcttctacatgctgggcgcgttcttcggctttcagctcacccgctggatcggcttctggccggcgctggtgatcgccccgctgctggtcggcgtggtcggcatgggtgtcgagcgctacggcctgcgcaacacccacaagcacggccacgtcgccgaactgcttttgacctttggtttggctttcgcgatcgaagagatcgtctcgatgatctggggcaagagcccggtcgactaccgcgtcccggccgcgctcgacttcccggccttcaccgtgttctccaccaactaccccgcctacaagatcttcatgctggtggtctcggtcgtgatcttcatcgcgctcctggttacgctgaagcggacccgggtcggcctcatcgtgcaggccgcgctgacccatccgagcatggtcggccatctcggccacaatgtcggccgcgtcttcatgctggtgttcggcgtcggcagcgcgctcgccggtcttgccggcgtcatcgccggtccctcgctggtgacgcagtccgacatggcggcgctgctcggcccgatcctgttcgtcgtcatcgtgttcggcggcctcggctcgctgcccggcgccttcatcgcctcgctgctgatcggcctgatccagaccttcgcggtcgcgctgaacggctcgctggccagcgtgttcggtccgctcgatccgagcctcggcccctcgccgctcaccgacatctggaacgtcacgatcgcgcagatcgcgccgatcctgccctacctgctgctggtgctggtgctgatcttccgcccgatgggcctgttggggacgcgcgagtcatgacgaacgctcccacgcccgcccccgccgcggccaagcaggagtccggcggcagcctcggcttctatggcgtctggctgctcgcggccgccgcactcgtcgtgctgccgctggtgttctcctccggcggctcgctgacctcgttcagcctgatcggcatcgcgatcatcttcgcgctgtcctacaacatcctgctcggccagaccggcctgttgtcgttcggccacgccgtgcaatacggcctcggcggcttcctcgccgtccacgccatgaacgcagtcgcgagccacaactggccgatcccgctgccggtgattccgctggtcggcggcatcggcggcatggccttcgcggtcgtggtcggctgggtcatgaccaagcgcgccggcacggtgttcgcgatgatctcgctcggcatcggcgaactggtcgcctcgtcctcgctgatcctgcgcagcgtgttcggcggcgaatccggcatcaccaccgaccgcacctcgctgatgccgctgttcggctggaccttcggaccgcagctccaggtctattacctgatcgcgttctgggtgctggtctcggcgatcgcgatgtatgcgctgacccggacgcccttggggcgcatctgcaacgcggtgcgcgacaatccggagcgcgtcgagttcatcggctacgatccgcatgtggtgcgctatctcgcctacatgttcgcgggcttcttcgccggcatcgccggcgggctggccgcgatcaatttcgagatcgccaactccgcctatctcggtgcgacgcaatccggcctcgtgctgttctcggcgtttatcggcggcaccgcctatttcttcggcccgatcctcggggccatcctggtgacctatctgcaactcgggctgaccagcgtcacctcggtctggcagctctatttcggcatcatcttcatcggcatcgtgatgttcgcacccggcggcatcgccggcatcctgatgaagcatcgtccgctgatccgcgccggaacgctcggcacggtgatcccgtcctacctggtcgcggcggttccgacgctggcgtttgcactcggcatcatcctgaccatcgagaccgtcgcgcgcttctccggcggcgatccgatcaacctgctcggcatcccgttcgtcgcgaccgcgccgacgacttgggtggctgctgcggtgctgctggtcggcggcttcatggttgcgcgcatcacctggaagcgcgtcgcggaggcctgggatcgcgccgcgacggtggcccgtgatcgggggtatctcgcatgaccgctgccattcaagtcaacgccgtcgagaagagcttcggcaatgtccagatcatccgcgacctcaatctgagcgtcgccaagggcgagcgtcacgccatcatcggcccgaacggggccggcaagtcgacgacgttcaacctgatctccggccacatcaagccgacctcgggtgagatccgcctcaacggcgcggtgacctcggggctgcggccattcgagatcaaccgccgcgggctgtcacgctcgttccaggtcaccaacgtgttcgcccgcatgacggtgtgggagaatgtccgctgcgccgtgctgtgggcgaccgggcatcgctacgcgttctggaagaacgtcgacagcctgcccgaggtgaagcagcgcaccgcgcagatcctcgacgatatccatctcagccatcgccgcgacgtgccggcgggcctcctgacctatgccgagcagcgcgaactcgagatcggcatcacgatcgccggcggcgccagcgtcatcatgctggacgagccgaccgcgggcatgagccacgccgagaccgagcgcgccgtcgcgctgatccgccgtctcaccgaaggccgcacgctcgtcatcgtcgagcacgacatgagcgtggtgttcggcctcgccgaccgcatctcggtgctggtctacggccacatcatcgcctccggcacgcctgaggagatccgcggcaacccgaaggtcaaggaagcctatctcggcgaggaggtcgactgatgctcgaagtcaggaatcttcacgcctattacggcaagagccacatcctgcagggcgtcgatctcgacatcgcggccggcgaggtggtgagcctgctcggccgcaacggcgtcggccgctccaccaccgtcaaggcgatcatgggcgaggtgccgccgcagggcaccatccgcttcaagggccaggacatcgcgggtctgccgagccacaagatcgcccgcctcggcctcggctatgtgcccgagcatcgcgacatcttcccgagcctgacggtgcgccagaacctgatcctcggcatcaaggatccgcgccgccccggcaagtggcggttgcaggagatgctcgacatgttccccaacctcgcccgccgcgccgatacgccggccggggtgctgtcgggcggcgagaagcagatgctgaccacctgccgcaccctgctcggcgatcccgagctgatgatgatcgacgagccgaccgagggtctcgcgccgctgatcgtgcagcaggtcggcgagctgatcgcgcggatcgcgaaggccggcgtcgccatcctgctggtcgagcagaagctgtcgatcgcgatgaagatctcgaaccgggtctacatcatgggccacggccgcgtggtgttcgaaggcacccccgagcagctcaagaacaacgccgccattcgcgaggaatggctcgaggtgtgaggcctgccgtcaggtgatgagccggagccgcaggagttcagcaatcgcctgagccgtgttgcgcgcctgcaccttctcgcgaaccgatctcagatgcttgtcgacgccgtggcccgagatgcccatccttgcgccgatctcgcgctcgttcaacccggaggccgcgagctgcaccgcttcgcgttcacgcagcgtgacgttgatcgccggctgcagctggaccatgttccgcaaacgaagcgcgcggccgacggcataggtcgcgatgatccgcagttcgtgccgcttccgagcatcgaccttgaggctctcgcccgcaatcgcaaagccgatcagattgccgtccagagacggcaacgcaagcgcaaatccctccttcaatccgaacgtcgcggcctccgccacgatccggcgcgacaagggatgctcaaggtattgcggggcgatctcactccagagaaacgggcgatggctctcgcgaatacagcgcctgatcggatcgtgctcggagtaattcagggcgatatagcgcttcagccagtcggccggccaggagttcagcagaatgcaccgggagtccgcagcgcgcatgccctgcctcggaatgacgacagcaatgaacgagctcgcgccgtagccggagacttggcgcatcacctcagccacgatctctgcttcactgttggcgttatcaagccgtgtcacgaaatccgatgtcgcctccaaagaacgctctggtgactctgatggcgaccttgcctgcatctaaagcatcctctcaacgatgggccacattggcaaaaggagaatcttgaaccgcgccctcgcacggcaagttcttatgttgttggagaagcagctggcgccgcatctcggaaagagattcagcttggccgctaattctggaatcgtcaaattcaaccgcgtcggccacgtcggcgcaagcacatatcacgcgcctcgcttgatcccagcgacaaccccggcggccagctcaatgccggctgcgcagttgccagcatcgcagctacgaaattgcgtacttacaatcgcaaatcttgtcatcgataatttccaacgcctacaacgattctcgcgtgccgcgcgcaacgcgtcctacacggagctgtcgcgagcagctcatccgtcatgacgcgctgcgtctggcagcgcggaacatgcggcacggatggtcaggccggcgcgcgggcgggcttcctgtattccgcggtctcggcgcgaagtaggtcgcagaattcgagcgcaagacggctgcgcggccgttgcgacgggaacagcagcacggtcgtgagctccagccgcggcgtgaacggcttgagcacgatccgggcgctggcaaaatcccgcgccacgacgggatcgacgatcgagaaacccagtccctgtgcaaccagagcgcagcgctgcatgctgtactgaatctccgccaccgttctgacctcggccccggcgtcttcgaaggcgcgttcgaggcgcgaccgatgcggcgcgcctggggctggcgcaatcatcgcctcgccgtgcaggtcctttgggataatcaatcgtttggaccgcagccggtgctgacgcggcagcacgcagatggcgtcggtcgtcatcagcagttcgtcgtcgaccgccgcaaaacctgactggggtcgtgccagcccgacatcgcactggcctgcggcaaccagactccagacccgttcaggactatgcacggcgaccgacaacatgatgccagggttcttcctggagaatttgctgacgatccgcggcatcaacgaataggtgaatgccggaaggcaggcgatcctcagcgtcccgctgcccctcgcgcgaatgccgcgcgccgcacgcgccaaatactccagtccggcctggttgcgctcgacctcatgcaggaagatctcgccttccggcgtcaacgtgacaccgccgcgcccgcgtacgaacagcgcgaagccgatctcgcgctccagccgcgcaatggcgcgactgacgaagggctgcccgatccgcaggctcagggccgccttggtgattccgttgtgacgcacgacctcacggaacaggtcgacgtgtctcggattcaggaacatgaccaatccgcatacgaactgccatttcagtcatttgacggcatatcggttcgatgcgtcaatagggcatgcaattcgtggacaaccatgccgccttggccactgaccgcatcctgctgaggaggatccgcggttctgaaatctcgcgggtaaggccgctcggggacgccggcatgcttcggcagctcgatcgcggcggctccggccagtccgcggccgcgcgcgcggctgccgcgctgagctgcgccaacgtcacggccgcgttcgcgatcgaggataccgggtccggcgacgtcatcggccttaccgctttcgcggcactcgagccgaacgaaaagcgggcgacgcttgcgccgatctggagcagcggacgatttggcgagatcctgctcatgagccatgtcgcgcatctcatgacgcggtatgcgttcgaggtgctcgccgtcgagcgggccgaggtgcatctggattggcggctgcggcgtacgctcgagctctacgctgacctcggctttcactgcgaaggacggcttcgcgcctattttgcctgcgatgaaggtccatcggccgacgctgcggtcctcagcgtggtgcgctccggatggccagccatcgccgaccggcagcgccggctcctcgccaacgaggcatggcgaggtcggcttccatccgatcggcccccatagagcaatgccggggacaggaccgcagcagatcgctcgtgacgcggaatctattccggccggatcaatgccacgacatcgcccgcccgcagcgtctgtcccggcttcaccggaaccgatgcgatgcggccggccgccggcgagagcaccgagatctccatcttcatggattcgatgatcgcgagcacatcgccggccgcgactttggcgccctcctcgaccaggatcttccagatgttgcccggtacttccgaaaatgcgccgacctggccgtcgggaatgccggtcgcaacggcggcaatctcggccgattcagccggcgcctcgtcgagcttcagctcgcgccagcgtcggcgctcggcatcgaacgcggcctgctgcgccgccttgaatgtggtgatcgacgactgcgcgccggccaacgttcgcgcatagtcggcgtaggagaactcgccctgctcgatcctgatgtcgtattgcccgtgcgggaacgcggcgcgggcatccagcagttcgtcggcatcgaccggaaagaaacggatcttgtcgaagaaccgcagcagccagggatggcctggctcgaacactttcgtcgtgcgccaggtgttccagacctggatggtgcggccgaacagctggtagccgcccggcccttccatgccgtagatgcacatataggcgccgccgatcccgaccgcgttctccggcgtccaggtccgcgccggattgtacttggtggtcaccagccgatgccgcgggtcgagcggcgtcgccaccggcgcgccgagatagacatcgccgaggccgagcacgaaatagtcggcgtcgaacacgatgcggcggacgtcgtcctcgctcgccagcccattgatgcgccggatgaactcgacattcgacggacaccacggcgcatctgatcgcaccagctcctgatatttgcgcatcgccagctcggcctgcgggtcgcgccacgacagcggcaggtgtaccgtgcggctcggcacccgcatcgcatcgacatcaggcaattggcgctcgatccggcgcagcacatcgagcagttttccgcgcgacagtgtcgtaccgtcgtagtggatctggagcgagcggatgccgggcgtgagatcgatcaggccgccgagctttgcgtcctccaatgcctgcgccagcacatgcacgcgcagccgcaacgcgatgtcgagctccatcgggccgtattcgaccagcagattgtcgtcaccggcgcgccggtataccaccgggatcggaccgtcatcgttgcgaccgacgatcgcagaaccgagctccggtgccttgaggacggtggggccggcaaccggatcgtcgcttttcaccggaacgaaacggacggtgtcgcccggccggagctgaccgaccttccagagttcgtcgcgcgcgaccaccgccggacagacgaagccgccgaggctcggcccgtccgggccgaggatgatcggcatgtcgccggtgaagtcgatcgagccgaccgcataggcgttgtcgtggatgttcgacggatgcagcccggcttcgccgccgtcggtccgtgcccagtgcggcttggggccgatcagccgcacgccggtgcgggcgctgttgaagtgcacctcgtagctcgtggagaacagcgtctcgatgtcctcgtcaagaaagaaatcaggcgcgccatgcgggccatagatcacgccgatctgccacgccgacgtgagctgcggccgctcgttctctgtggcgcgctgcggcggcgccaggccagttgcttccgcgccgatatgcagaacatctccggccttcaaggagcccgtggcgtgaccgccgaaggcgccgagcgcgaacaccgcgcgcgagccgagaatctgaggcacattgaagccgccgcgcacggcgagatagctgcgctgacccggccccttgatgctgccgatcgcgagcgtctgaccggcgcgcaccgcgatcggctcgtgatacgcaatctcgacgccgtcgagcgccgccttcatctgcgcgcccgagaccgcgacgatcgcatcagtgttgaagcgcagggttggtccgttgaccgtcagttcgagcgcggtcgtcgtctccgggtttcccaccacgcgattcgcaagccgaaacgaccgttcgtccatcggaccgctcggcggcacgccgacatgccagaggtgcagccggccgggcaattcctgcacgccgctctgcgcaccgggtgcaacgacatcgatggtgcggggacgataggcgaacgcgccgagcacgctggtcgcgacctgcccgctgcggaacacgtcggacgtggcgatcgcacgcagataatcgagattggtctcgatgccggcaatagccgtctcatccagcgcctgcgtcagccgcgcgatcgcggcttcgcgcgtgtcggccgtcacgatgatcttggccagcatcggatcgtagaacggcgtcacctcggagccggtctcgatccagccgtcgatccgcgcatccggcgagaaagagacctgcgtcagccggcccgcgctcgggcgaaaaccggcgcccggattctccgcatagagccgcacctcgatcgccgcgccctttggcgcaagcgtgcccgcggtgcccagcacgtcctcgccggccgcctgccggatcatccattcgacgagatcgacgccggtgacctgctcggtgacgggatgctcgacctgcaggcgggtgttgacctcgaggaagtagaaatcctcccgctcgacgtcgtagatgaactccaccgtgccggcggattcgtaagccaccgccttgccgagcgacaccgcggcttcatgcaggcgctgccggacctcgccagagagccccggcgccggcgtctcctcaaagaccttctggttgcgccgctgcagcgagcagtcgcgctcgccgagcgcaaccacgtcgccgctgccgttgccgaagatctgcacctcgatgtggcgggcgcgcgcgacgaaccgctcgagatagacccgggcatcgccaaagctcgcgcgcgccgtgcgctgcacggacgcaaagcgctcgcgcagcgtcgcgacgtcgtggcagagctgcatgccgatgccgccgccgcccgccgtgctcttcagcatcaccggaaagccgatccgctcggcctcgcatacggcctcgtcgatggtctccagcaggccggagcccggcagcagcggcacgccgctccgctccgcgatctcgcgtgccttgtgcttgaggccgaaggcgtcgagatgttccggccgcggcccgattaacctgatgccgtgctcggcgagccgctcggcaaagcggcggttctccgacaggaagccgtagccgggatgcaccgcctgcgcgccggtcgcaaggcacgccgccatgatcgcatcgacgttaagatagctctcggcggccggcgccgggccaatgcgcaccgcctcgtcggcctcgagcaccggccgggtgaagcggtcggcgtcggaatagaccgcgaccgaagcgatgcccatatggcgcaacgttctgccgatccgcccggcgatctcgccgcggttggcaatcaggaccttgctgaacatgcctcacgcctccggctcgaagatcgtcacctggaccggcgtcgggaagaagccgttgcagggattgttgatctgcgggcagttcgaaatcaggcacagcacgtccatctcggcgaccagctcaacggcgtcgccaggcttcgagacgccgtcgaccacggtgaagttgccggccggatcgatcggcacgttcatgaagaagttgaggttcggcacgatgtcgtgcttcgagaggccgtatttcgcggcttcgaccacgaagttctcgcggcaggcatgctggtagcgggtctggtgaccgaatcgcacggtgttgctctcgcaggagcaggcccccgccgacgtgtcatgcaggccgcaactgtcggccgtgacgcgcagcatcacgcggccttcgttggacatgatgttggtgccgagcccgacataggccgagccctgcgcgcgcagcgtatcctggccgctgtagcgctcgccgaaatcgctggcgcagtagaacagcgtatccaccgcctgctggccatgggtatcggtgatccgcagggtctggcccttgcggatgatcgccgaccacggctttcgcgcggcaatctcaacgtcgaggacaatgcggccgttggtctgggcggattgcgcggtcattgcactgctccttcggtggtctcgccgaaatacagcgcgttgttctcataggcgcggatcgcttcagccgtcgcggttcggcacaaatcatccgccgccggcgcatcggcgcggtaacgtacgatctccacgctcgcctgcggataggtcacagcaggatcgagcggatgcgggcagttcgacagcgcaatcaacaggtccatctcggcgcgcagatcgacgaagtcgcctttcgcgcggcgctgcgccgaccagacgaacttgccgtccgcgtcgatcgcgaccggcgcaaagaagctgacgcagggatgcacgtcgcggcggccgagcccgagcttgcttgctgcgagaatgaagttgtcgcgcgtgttgcggaaattgccgtcgccgtatttcgcctggttggtcgcagccgtcgaaccgccgaccaccgcgtcatgcgccgcgctggtgtcctcggtgaggccgagcagcgctcgccccatgtcggacagcagcacgcgtcccttctgcagccgcgccgcccattgcaccttgatggtgtcggcgtggttcagccgttcactgggatcggtcgcattccaggcgagcaggctgaccgtggatgtccccgaattgttgacgatgcgcagcgtatcgccgcggtccagtcgcgtggtccagtaccagccggccggaatcacctcgcgatggatgatcgccgcagcggcgatcggtactgcgtcgcgcgcggtcggcgccggcagcgcgcgcggcgcatgctcctgccccgccgccttcagctcgttgtagcgcctcgtatgcgccgcgacctcggccttctgttcctctgtgaggatcatggttgctccttcaagacgagagcgccgggccgtcccggctgatgctccttgcctgatcgggtcgtcccgatcggagctggttgaatgatcgcgcgcggctctgcgctgcggcgcggaaatatctcgaggtcgcgcgacacggtggcgccgtaacgctcgcgctcctccgggcgattgcgcgagcgctccagcgcgatcacgcgcgtcgcgagcccgaacgcttcgctgaggtcatgcgtgaccatcacgacggtgagatgcgtctcattccatagccgcttcatcagcacatggatgtcggcgcggatgcccgggtcgagcgcgccgaacggctcgtcgagcagcaggatctttgggccgcgcatgatcgcctgcgccagcgcgaggcgctgctgcatgccgcccgacagcgccgacggatacttgttctcctggccggcgagcccgacctctgcgagcagcttcatggcatcgtccgccgcggcgcgccgcgcggcgccgaacaggcgggcggtgaacttggcgtcgcgcagttcgcgcccgagcatcacgttctgcaacacggtgagatgcggaaacaccgagtagcgctggaacaccacgccgcggtcggcgtccggttcggcgggcaacggcttgccgtcgaccaggatccggccgcggctcggctgctcctcgccgagcagcatgcggagcagcgtggtcttgccgcaaccggacggaccgaccagcgcaatgaaagcgcgcggctcgacctccatcgtgatgcgctcgagcacgatgtggtcgccatattccttccagacgtcgtcgaagcggatcgcgctcattccgccctcaccgaggcaaaccagggaaacgccctgcgttgcagaacgcgcaggccgacatcgatcaggaacgcgagcagcgtgatccaggcgacgtaggggatgatgacgtccatcgcgagatagcgccgcaccaggaagatccgatagccgagcccggaatcggaggcgatcgcctcggccgcgatcaggaacagccaggccgggccgagctgcagccgcagcacgtcgatcagccgcggcagggtttgcggcattgcgacgcggagcgcgatctgccaggtcgaggcgccgagcgtctgcgccttgacgatctgctcgcgcggcaactcctgcactttcatggcgaggtcgcggatcatgcaaggcagcgtcccgatcacgatcagcgcgatcttcgaattctccccgagccccatcacgatgaacaggatcggcagcagcgccagcggcggcaccatcgaggtgaccgatacgaacggtccgagcagcgcattggcgcccggcagcagcccgatcacgatgccgagcaccagcgccgccgtcgtcgagatcgccagcgccgaccccagtcgcccgaggctcgcgacggtgtcggaggccatcagatagccgccggtgcgcggatcgacctcgaacgccatctgcttgaccgcctgcaccatgctcggcagcgccggcagcagcttgtcgttcgggttctgcgcgagccgcgcgccggagctggcgaagtaggcgattgcgaccaacaggaacggcagcgcgagcagatagaatcgcgtctgccgtcccggccgtatgttcacaagtcgcatcgtcggctcctgctttggggatcgcgccgtggcgtcagggcctgccctcagagcttgcccttggcggcttcgtccatgaaggtcgggtcgaagcgcagcttgacgttcgacttgtcgccgagcaccgacttgtcggcgagctcgatgccgacggcgtcggccgacttcgcgcccttgccgagcaggtccttttcgaacaggaatttacggacccggtccatcgtcgtcccgatcgtcttgctgcgcgtaaaagcttcggcgtcggttgccttgtcgaacagttttgtggtcgagagctggctgtcgaaaccggcgaggtcggtgccggaggccttggccatcgcctccttggcagccttcgcggcgggatcgttggcggtcatcctggacagcgtctcgtaccagatgccgaccagcgccttggcgaaatccggattgtccttggcaaccgcggtgttcaccaccatcagatccatgatctcgccggggatctgcgaggagtcgaaaaccttcctggcatcgggcgagccgaggatttcggtcacgatcggattccaggtcacgaccgcattgacgtcaggggtcttgtaggcggcggcgatatcggcgtcggaggtgttgacgaccttgacgtccttctcgctcagcttggaggtctcgagtgcccgcgccagcagataatgcgacaccgagaattcaaccaggttgacggtctggcccttgatcgcggcgaggtccgacttgttcttgaggatcaccgcgtcgttgccgttggagaagtcacccatcacgaccgctgtggtgtcgacgccgccggctgccggaatcgacagcgcatccatgttggtgatggtgacggcatcatagccgccggcggtatactgattgatcgactcgacgtagtcgttgaactgcttgacctcgatcgtgatgccgtatttgtcggcccatttcttgacgatgccggtgtcggccgcatagccccacggcatccacccgacatagatcgaccaggcgaccttgaagcttttcttcggcgccgcctcggccgcgggcgccgccgcgagcacgaccgcgcagccgatgacaacagagcgaaggaagaaagagaacttgttcattgccgatccctcttgcgaaacttcacaaaaagggactggcgaaaagaccatcgctccgccaatcccttggctaacgaggtctcccgggcttttatcccgccgtgcacctgcggggatgtctcccccgcaagcggctgctctcggaccagcatcttgcctggcaagatcggaaccctagcggccaactcagcgcctttgatgcacgaggcgtgccaaagcaccggcaactgaatctgatgagattttccggcacgcgcggcgcggccgcgtgggcggcctgcttagaaactgcgcaggcctgcccagatttggctctgtccttcggtcaccgacatcagcaggatcaccgatgcggatgtcgaggggaaagtcgatgcgcaagctcctgaacattctatgcgccggcctctggcgcggactacacggccggttcggccgggtgccgaattgcgacaccaagctgggcgcttcctaaatttggctgggattgcgttatcccgctacgcgcagtgctcgtcctcaaccgaggcatccagccacgccacgtcgcgagaacgcgaagctgtatctcatccgaaccgtcatcgcgacgcgtggcttgacgagccgaagctcgcggccaacggcccgcctgcgccctttgggcttcggcgcggtcgtccgtcttcgctttcacttcgcgttcaagctacgccggacacgcttcgctctggcggtctccggcgtggctgcgccacgcgaagcccgtcagggcgaagcgtggtgggtgcgacagggatcgaacctgtgacccctaccatgtcaaggtagtgctctcccgctgagctacgcacccaaagccatgtttggatcgggtccctataacggaccgcggcggggcaggcaaggatgcaaagtgaaggttttttggcgaatcaggccgccagcaacttgttcacttcgctgaccaattccctgaggtgcacgggcttggccaacaccttggcgtttttcggcgcctccgaatcggaattgagggccaccgcggcgaagccggtgatgaacatgatcttgatatcgggatcgagttccgaggcacggcgcgccagctcgatgccgtccatctcgggcatcacgatgtcggtcagcagcatttcgaacggctcctcgcgcagccgctggtaggccgacatgccgttgtcgtgcggcgagaccttgaatcccgcattttcgagcgccttgaccaggaagcggcgcatatcggtgtcgtcttcggcgagaagtattttcggcatggcaggaatcgtcgaatccggctggaggagcagtccgaacagtaagcccgacagacggtaaatttcgggtgaaatttgcgtcaagccagcggcaaatgcgcaccagcgatttgtggaccgaaccacgcgtcgaatcaaccatcagcggcatttcccgcttttaagacgcgttccagggcgcgccacactcttttcacttggcagaatgatcgcgattaccgacaatgcctgcccataaatctccgcttttccggcagaaccagttcttgcggggcgaggcggacgcaagggacggcgccaagggaatgaccgaatttgctggcgagttgtcgcccccgttcgagatcgttgagccgcaggcctggcgcgcgccgatcatcttcaattccccgcattcgggctcggtctacccggccgaattcctcgaggcatcgcgcatcgatgtggcggcgctgcgccgctccgaagacagtttcatggacgagctgatcgccggcgtgagcgagcgcggctttccgatcgtccgggtcaacttcccgcgctcctatgtcgacgtgaaccgcgagccctatgagctcgacccgcggatgttcaccgggcggctgccgagcttcgccaacacccgctcgatgcgggtcgccggcggcctcggcaccatcccgcgcgtggtcggcgacggacaggagatctaccgcgagcggctcgacgtcgatgacgcgctgcggcggatcgaggtgctgtacaagccctaccaccgcgcgctgcgccggctgatcaacaaggcgcaccaggcgttcggcgccgtgatcgtggtcgattgccactcgatgccgtcgatcggcgtgtcgcgcgacgagccgcgccggcccgacgtcgtgatcggcgaccgctatggcacgagctgcgcgccgctgctgcccgacctcgtcgaggagatcatgagctcgctcggctattcgatcggccgcaacaagccctatgccggcggtttcatcaccgagcattacggcaacccggcgagcggcctgcacaccgtgcagatcgagctcaaccgcgcggtctatatggatgagcgccaccgtgagcgcggaccgcgcttcgcccaggtggccgccgacttcgcgacactcgccgatgctctcgcaaagattccgttcggagatctcggcccattccaggcggctgctgagtagctgcgtcgtcgactagccatgcggtgatcgacgaagtcgtgaacggggaattcagttggtggcgtgaccggatgcgaaattggattccgcattcacgccgggaagtcgtcgaaccaagaaaaaagggccgcttgaatgaacaagcggcccaagtctagggaggaaacgcccaaggagggcagcgatagcgcgaggcgctaccgcaccgcaacaatatgcgaccgcgctgcacaaaacgcaagaactttcgaaacatttcctgcgtatttgttagtaggctgtcgcatttgccacaggcccgcgccggaaatttttgttgttcagtatcagagacttacgggataaaccccggtcagacggcgctttgcgcatagcttgtataccagaactcgcgacttcgtgatccggccagcagccagagaggctttcgaatccgaagccaaatcgaaagtccgaaaccgggtcatcaggctgggataacgctgcgttaatcgtgcgcacagcattggattgagctaggcaagaacgcatccgacctctaccgcgtcgttttgcgcatttcagggacaagccgtgacggtcatcgacttcaccgccttcatcggccgcctcgcgaccgcatccggcgaaaccatcctgcccttcttccgcacctcgctttcggtcgacaacaagagttcgaacgatttcgatccggtcaccgaagccgaccgcgccgccgaagcggtgatgcgacggctgatcaaggcgaacttcccccagcacggcatcgtcggcgaggagttcggcaatgagcgcgaagacgccgactatgtctgggtgctcgacccgatcgacggcacgaagtccttcatcgccggttttccgatctggggcacgctgatcgcgctgctgcacaaaggtacgccggtattcggcatgatgcaccagccctatatcggcgagcgcttctccggcgacaacggctcggcgaattattccgggccgtcgggcggacggcggctctcggtgcggcgttgcgcctcgctgaaggaggcgaccaccttcaccacgagcccgcttctgatgaatccggatgaccgcgcccgcttcggccgggtcgaaaacgcggcgcggctgtcgcgctacggcggcgactgctactcctattgcatgctggcggccggccatctcgacctcgtgatcgagaccgagctgaagccctacgacatcgccggcctgatcccgatcgtcaccggcgccggcggcgtcgtcaccacctgggacggcaagccggcgcagggcggcggccgcatcatcgcagccggcgatccgcgcgtgcacgaagccgcgatgaagctgctcaacgcctgattctcgggttgccggacgattgatctgcgcacatcctgactgcaacgagaaaagtcaggggtgggcgcacatgacgatttgcggcaggctgttggcagccgttctcctgcttctcacgcccattgcagcttcggcccaggagttcccgaccaagccgatccggctgatcgtgccgttcccgccgggtgggccgaacgacatcatcgcgcgggtgatcggacagaagatatcggaactggtgaagcagccgatcatcgtcgacaatcgcgccggccagggcggcgtgctcggcaccgacgcggtcgcgaaggccgcgcccgacggctacacggttgcgatcgccagcgccggcgcgctcgcgatcagcccgagcatggaaaaggtcgcctacgatacgctgaaggatctcgccccggtgacgctggtcgccaccgtgccggaaatgctggtcgtcgccaccgacgtgccggcaaagaacatgagcgagctggtcgcgctcgccaaggcgcagccgggcaagctcaacttcgcctcctccggccccggcagcctgccgcatctggcctgcgaattgttcaagctgacggcgaagatcgacatcgtccacgtgccctatcgcggcgcggcgccggcagtgaacgatctcctgggtcggcaggtgcagatgaccttcctcgacctgccggtgatcctgccgcagatcaaggcgggcacgctgcggccgatcgcgctcgggggccgcgagcgcgccccgaccgcgcccgacgtgccgaccacgacggaggccggcatgcccgacctgatcatcgagaactggtacggcatggtcgcccccgcaggaacgccgccggcgattatcacgaggctgaacatgatcgccaccgaggcgatggccgatccggccgtgaaggcaaagctcgccgagcagggcctgacattggccggcgacacgccggagcatttccgcgacttcatcgctgccgacatcaggaaatgggcgaaggtgatcgaggacgccggcgtggtgacggcgaagtaacgctaataatcgagccggccgcgcagctcctcgaacggaagcatgacgtgctcacgaaacggcgggcgctgttgcagcctccgataccagcgctcgacggccggcaacggcgggcgtgcgatctcgagctcgaaatagcgatagagcgaggtccctgcggtgatgtcggcgaacgacaatgtctcgccgagcaggaacgggttgctttcaaggaggcgttccagcttggcgaaatgctgctcgcagcgggcgagcgccgtctcaatcgccggccaattgcgctgcgcttcaggggtgcggaagaatccccagaacacgccgccgagaaaatccggctgcagcgcggtctgcgaccagtccatccagccgtcgacccgcgcccggacgacgggatcgtcggaccagaagcgaccgttgccatagcgcgcggcgaggtagcgcaggatggcgtgggattcccagacggttgcctcgtcatccctgatgacgggcacacggccgtgcgggttcatcgccaggaaggccggtgcatcgagcccgccgaacgcgccgccggcatcgatatgctgatgcgccagctcgagctcgccgatcagccacatcaccttctgcacattgaacgaactgcggcggccccagacggtgagcatggcactctccttgatcagcgctgcgcttcggcctgcaaatattccacgagctgtttggcggcgcgcggcagcgccttgaagctgcgggcgcagatcgtgagccggcgattggcccaggcgtcgcgaatccttatcgtcgtgatcggcatcgaagccgcgcagcgccgggccgcggtttccggaatcaccgcgatgccgacatcggctgcaaccatctggcagatcgcgtcgaagccgcgcagacgggcacggaagcgcagccgcgcaccgagctttgccgcatggcgggaaatatggacctgcaacgccgacgtcgccgtgaggccgacgaaatcgcgcccgaccacctcctgaaagtcgatctggcggcgattgccgagatcgctgcgccgcggcgccaccagcatcaggcggtcctcgctgaacaggaagcgctcgacactgtcgggcagcgcgtgctcggctgcgaagccgagatcggcggcgccgctggcgatcgcggtcgcgatatcggtgctctcgcgctcctcgacatcgacgctgatatcgggatgttcgtgcaggaaggccgcgagtgcgcgcggcagatgctccgacagacccgaggtgttggcgagcagaagcacgttggcgcgcaccccgctggcataggcggcgagatcgctttgcagcgactcgacattgtggatcacgatgcgggcatggccgagcaggctctcgcccgccgccgtcagctcgacgccgcggcggccgcgcttgagcagtgcgacgccgagcgcctcctcgaggcccttgatccgctcgctggcagaggccagcgcaaggtttgcgcgcaccgcgccctgcgtgatacttcgcgcatcggcaaccgcaatgaacaactgcaagtcgatcaggtcgaaccgcatcattttttccgttccgccccttcgggatgcccgaaggctaactccgtaacctccagattgtgccgatcgcgtcgatcggtcaatgtcccgccatggtcgaccatctgctgatcttcatcgctttcgccttcctgctcgccggcttcgtcaagggcacgctcggcctcggtctgccgacggtcgcgatggggctgctcgcaaccacgatggcgccgggccaggcgattgcgatcgtgatcgtgccggcgatcgtcaccaatatctggcagaccttcgtcggcccctatctgcgcgacatcctcaggcggctgtggccgctgatgctcggcaccgtcgtcggaatctggatcaatgccggactattgaccgggccctacgcggcctacggcaccgtggtgcttggtgccctgctggtgatctacgcgatcgtcggcctgagccggttcaacttcaaggtcgcgcggcgccatgagaaatgggtcggcggcatcgtcggcctcatcaccgggctgatctcggccgcaaccggcgtccaggtcatcccctcggtgccgttcatgcaggcgatcggcatggacaaggacgagctggtgcaggcgctcggcgtcttcttcaccaacgcgaccctggcgctcgctttcaacctcacggcctcgggcctgctgactgcggcgaccgcgctgccgggtgcggtggcgatgatggcgtcattcaccggcatgttcatcggccaggcggtccgcacaaggatgcagcccgacgtgttccgccgctggttcctgatctcgatgatcctgctcggcatctacctcgccggcagcgcgctgctcaagatccacggctagattcttgtttgacgcgttttcttcacgcgaaccggtaagccacctcgctcgaaaacgctctggcgaccgctagcgcgcctccagcatggcgacgcggacgccgagatagatgaacagcgcgccgagcgagcggttgatccagccgatcgcgcccgccgattgccggatgccgccggcggccttcgccgcaaaggccgcgaggccgaggcaccagagcgtgccgccggtgatgaagatcagcccgagcaccaggaaggcgagcgtcttatgggctgagtccgccgccacgaattgcggcaggaaggccaggaagaacagcgccaccttggggttgaggatgttggtcagggcgccctgccagaacacgcgcgagatcgaggtctcgccggcctgccccgcgacctccgcgatcggcttggtgcgcgacaacaacatctgcaggccggtcagcaccagataggccgcgccgatcagcttgacggccaggaatgcggtcgacgacgccatcagcagcgccgacagcccgatcgcggcacccagcacgtggacgaggcagccgcagctgataccgattgctgcagccgcaccgccgcgccacccgagctgaatcgtgcgcccaatgatataagcggtatccggcccgggcgtgacgttgagcagcagcccggacaggacaaacaaccaaagttcgtgaattcccagcatgcggcgagattaacctatgtaagtaacgaaccggaaaggacggtcagccaagctgcgccatcccagcgacacacgaattcggtagagaaacggactgtacgatccgttggtcgcatgccaattcctgctacaatgcattataggtgcccgtaaaccgagcttccgccggacccgagctgtcttgtaagtatcggattcggtcacctcggctaagtggccattccagggcacgggagacatggaaagacggctcgctgccattctttgcgctgatatcgccggctattcccgcatgatgggcgtcgacgaggcggggacgcatgcctcgttcaaggcgcaccgcagcgcgatctatccgatcatcctcaaccatggcggccggatcgtcaaaaacaccggcgacggcttcctgctggaatttccgagcatcatcggagcgatcgaggccgccgtcgcaatgcagaccctgatggccgagcgcaacgaacatttgccggccgaccgcgccatgcatttccggatgggcgtccacatgggcgacgtcatggccgacgaggacgaggtgttcggcgacgacgtcaacatcgccgtgcgtctcgagacggtggcatcgcccggcggcatcgcggtgtcggacaaggcccgcaccgaggcggggcggcggcttgccgtgacgctgaccgatgccggcccgcatcgcttcaagaacatcgccgagccggtcaatgtctggacctgggcaccggccggatccgatacccaggagcacacgccggaagacgggccgcgtctgccggggcaataccggaccgcgatcgtcggcgtgctgccgttcgacaatctgagcggcagcgccgacgaatatttttcggacggcctgaccgaagatctgatccatgcactgtcgctgcaatccttctatcgcgtactgagccgcaactcgaccttcgcctacaagggcaagaacgtctcgacgcgcctgatcgcccgcgagatcgacgccacctatctgatccagggttcggtgcggcgcgccggcaacaagatccgcgtcaccgccgagctgatcgcgcccgagaagggcgaacagctgtggaccggccgctacgaccgcgacatgggcgacctgttcgcgatgcaggacgagatcaccgccaacctctccgccgcggtcgcgcaggagatctaccgcgccgaagcctcggcgccggcccgctcgccgaactccgagctgaccgcgtgggatcgcttcctgaagggcctgtcgcactactatcaccagaccaaggccgatagcgaaaccgcgatcgcgctgttcaaggaggcgatcgagctcgatcccgcgctgtcgatcgcgcgcgcctatctcgcgctgatccagatccagagcgtccagttcggctggattccgagcacgcgcgaattgtgggcctcgtcggtcagcctggccgagagcagcgtccggctcgatccgcgctcatcgttcgcattttcgctgctggcctatctgcacgcgatgcagggccactacgaagccgcgatggatgccatcaagcgggcaatcgagctcaacccctacgacatgggcgcgcgcggcgtgctcggcatctgccacatggtgatcggcgatcatcgccaggcagtcgagctgttctcgacggcggtccagcgcggcaacagcgacccgcgttatcaatggggcgccttgaacgcgttcagccattacctgctcgggcaatatgacgcatcgctgtcgtggtcgcgcgaaacgctctacctcaacccgaaccatctgcagggccttgcggtgcgcgccgccgcgctcgcccagctcggccgtgtcgacgaagccgcgcaggcggccgaggcgctactcgccaaccatcccaagctgacggtcgaacgtcacttgcgcaatttccactggaagaacccggccgacatcgcgcattatcgcgacggcctcttgaaagccggcctccccttcggcaaactcgctctggttgcatccgcgtcgaaattcgccgtcgattcctgagcgaattcattcaccggtaacggatgctttctaggctgaagcttttcaggatgtggtttgatgtccgatacggctgcaagcgcggcgcccgccccgcaggtctcccctgacaatccctgcccgttcctgcgcgcgctggtcgccggcaattatgtcggcggccacatcgtgccgctaccgcagctgaccgcaaccatcgaccgcgccaccggcaagaccggccttgcggcgctcagcgccggcgccaagatcttcatggtcgcgcagatggccaacggcatcagcccgttcagccagatgcgcagcctgttgcagggcgcgatcctcgaccaattgcgcaacggcccgctcgacaagcacggcgccggctcgcgcatcctcgaccagcatgccgtcgtgcatgaagacgagatcgcgcggcttgccaccttcggctcggactacaaggcctccgacggcagcgtcgaacgcgggctgtcggccgccgagatcaagaccttcatggcggcgaacttccagcgcgccaaggaccagcatccgccgtcctacgccatcctgcactgctactatccgctgctgatgctcggcgaatggcccgtactgctcgacatcatgggcaagggcgaaggcaaggaccgctatctcagcgtcgccgaagtcaggaccctgttcgtcgagcagcgctttcccgaccgcatcgtcgcgctgctcaacggctgagttcccgggacgcagttgcgtccggaataggggatgccgcaatcgccctgctgtctacagcggatcgaaccgcgatcagatgcagcggcttgtcggtattcggcataagaattcttaatgaaggaacggtcaaactctcgccggcaaacctccgaggacggccggcaatgcaaaatcaacactccgatctggtcgagcgactgtcgcagctcgcgcaagcgatggctgaagggcagagcaagggcatgttccggtgcgaagacatgatctccgccacggctgctttcgtcggcgagtgcgcgatgcgcaatgccgacgaactcgatgtcgacaaccatccgtacgcgcccggacgcgcgatcttctcccaaaggatcaacatggtgctgtccggcgatcgcaccgactggcgggaggtcccgatcacgagcacgttcggcgccctctacggcatcctgacccatgcgggcgcgccgggcggcgcctgggatccgcgcatctttccggacattgcggggatctatcaaagctatgccgcggcacgcggaccgaacgccccagcaggccaatggggattcgtcccgctcggcgtcgcaccgggccatgcgccgaaaatgccgcccctgcgtgctgcgttcgagctgcgccggctcgcctttgccaaccgcaccgcagctttccccagccgcacggacctgtcgaccgtgtctcagctcgccctcgtgaaggtgctgaccaaaacgcgacgcgccatcgcggaagccgtagcgatcaagctcgccttcgagaccatcaacggcatggcaaagaccgcgccggtgctgctcaagcatatgcagccgggcgggcagcgcgccgcatcgtgaccgctccgctgctcacttgaacagcggcgtgcccggcacgaaggcatcgaacgccgcccagaactgcgcgcggtagcgatcctgctcctgcaggatctcgtgcttggcgccggcgatcacgagatgcgagccggcgcgcagatggtaggcgaactcctcgatcgccgccgtcgacaccacctcgtcattgctcgccgccagcatcaggatcggctggcggatttcggagggatacgacatgccgcggaaggtgcgcatcgcggtgaacgcggtgtcggcccaggcgatcgtcggcgcggcgatgccgagcgtcgggtcttcttccaggatcgccgcgttgcgggcgtggcgcaccggatcgctggttacgggattgccgatgaagggcgcaaggccgaccagttcgctgttgccgcccgggatgtaattgctgccctgtccggtgaggcgcatgatccgaagcagcgcgctcgggaagaaggagacgcggccgcgcggcaggtcgatcatcggtgccgacagcaccatgcgatcgaaccagcgcttgccggcatgcgcgatgcgcagcatcaccgcgccgcccatcgaatgcgccagcgcgaaatagggcggcgggcaatccggcagcaccacctgctggacgaaggcttcgacgtcggtctcgtagtcggcgaagttgcgcacataacccttgcgtgggtcgcgcagccgccgcgacgaatggccctggccacgccagtcgatcatcgccaccgcgaagccgcggtcccgcagatcgcgcacggtctcgaaatatttctcgatcatctcgccgcgcccgctgaacacgcagaccgtgcccttgcggccggggggcggcgcccaacgcgcaaagcgcagctcggctccgtctgatgttttgatagtgccgctgaccacgtcgtccggaaccgggttggcgggaatcgagacgagcgtcatgcgggagaccgacgtggtgagacagggtggagatcaaggacgccggcgccagaaaagcgacgcggtttccgcctcttgaacgcgacgtgacccctcccatatcaccctagtgcaggccgctaccagtgtttcggacccgaaacatcaggctgcacacatctaagcccggcccgatggcgggcgggtaactgaaacagtcgctcactggaggactattctatgcgtagctacgacctcactccgttctatcgttccaccgtcggcttcgaccgcctcttcaacctgctcgatcaggtgacttcggacggcagccccggctatcccccctacaacatcgagcgcaccggcgagaatgcttaccggatcagcgtcgcggtctccggcttttcgcaggccgagctttcgatcgtcgcgaaggagaacacgctgacgatcaagggcgagaaatccgccaacgagaactccggcaacggcgcggaagtgctctatcgcggcatcgcctcgcgcgccttcgagcgcgtcttccagcttgccgacttcgtgcaggtgaagaacgcctcgctcgagaacggcctgcttcacgtcgatctcgtccgcgagattcccgaggccaagaagccccgcagcattccgatcggcggcggcgagaaggccccgcaggtggtcgacggctcggcgaaggtcgcggcctaagcaatgccccccgcgtcagcagatattggctgaacgcgaaaacgccccgggaaaccggggcgtttttttgcggccggttgccgctattccaacccctgtaccttcggcatctcctgcgtcggcaggatcgcaggcgcaggcgccgccggcggtgacgcggcccgaccgacggttgggacctcggcctgctgaacggcctgcggcgccgccgcctgggtctcggcgggccctggcgctgccgcggcctgctcggctggcgcaggtactgccgcctgggtaggcacggcagtctgcggcacggcggcctgggccgctgcggcaggagcctgcgccttggccgcaagcgggctccgcttcggtaccggcacgcggcttgcgacatgcggaatcgggagcggcggccgtggcaccctcgcctggatcggccgcggcatcgggccgaccgggccgtaggtcgcgctcatctcctcctcgtaattgtcgccgagccgataggccggggtaaagcggacgatgtgcccgtcgcgggcgtcgatcaccagccggccgtcgtcgccgccctggtcgatcaccgagatcgtgtagacgaagccgcgctgctgcggggcgccgagcggcaggtagccgttctcgcgcagcacggtgtagacctcgaccggcggcaacaggctcgggacgcggccgaaacgcggcggcggcggaacctcgggcatcgccgcgtaggggccgtcgatgtcggataccctgacgaaggacgggctgccggcccgagccgaggtcacgagctgcgcctcggccgaggctgcgctgaacgcgagagcggcggcagcgaccgaacctgtgaacaacttcatcgccgtaactcctgtctggcccgacttcaggagctttccgctctcttgctggcttgtccgcgatgaaatttcggtttgaaatccggcagtccttggtcgctccttgggccagatcacggcgtgtttgcttcgaatcgggggcgcggcgggggcccccgagccgttcgttccgagcatgcgggcgaggacttcctcgcgcttgtgtgatagacaaaaatttggcaaggtcgatgttaggacagcaaggctgtctcaatttcgaggccatcccggcatggggattgcaacgagaaccttcgcgaggaggtcctcggcgccccgggctccgagaatgctgcaggcagggccgttccgcagggaacgttgaaacgcccgtcgcctgaatttaggaaaatgcggctcgcggcggacgagcggtggcccggtgggtgccgcaacgtccaaggtgcgccaaatagggtgaggccccttacgcaagggagaggacacatgagcgggtcggaattcgagcgcgaaaacatcgtgacaggtgcgctgtcggcgaccgcggactcgaaagccgccgaacccgcccgcgagctccacccgcttgaacttcatacttggcgtccggaagccgaaggcctgttcgatccgagcctggaaaaggactcctgcggcgtcggcttcatcgccaacatcaagggccagaagtcgcaccagatcgtctccgacgcgctgagcatcttgtgcaacctcgagcatcgcggcgccgtcggcgccgacccgcgcgccggcgacggcgccggcatcctggtgcagatcccgcacgctttcttcgcgcgcaagacctccgagctcggcttcaagctgccgcagcccggcgaatacgccatcggcgcgctgttcatgccgcgcgatgccgcgtggcggaacgtgatcaagagcatcatcgccgacgagatcaagaacgaaggcttcaagctgctcggctggcgcgacgtgcccagtgacaattcctcgctcggcgtcaccgtgaagccgaccgagccctatcacatgcaggtcttcatcggccgcaatggtgcggccaagaccgaggacgatttcgagcgccggctctacatcctgcgcaagtcgatctcgcaggcgatctatcagcgccgcgaccgcggcatggccggctactatccctgctcgttctcgtgccgcaccgtgatctacaagggcatgttcctcgccgaccagctcggcaagtactatcccgacctgcacgaagccgatttcgacagcgcgctggcgctggtgcatcagcgcttctcgaccaacaccttcccgacctggtcgctggcgcatccctaccggatgatcgcccataacggcgaaatcaacacgctgcgcggcaacgtcaactggatggcggcgcggcaggcttcggtgcattcggagctctatggcaaggacatcagccggctgtggccgatctcctatgaaggccagagcgacaccgcctgcttcgacaacgcgctcgaattcctggtgcaaggcggctattcccttccgcatgctgtcatgatgatgattccggaagcgtgggccggcaatcccttaatggatgagcagcgtcgcgccttctacgaatatcatgccgcgctgatggagccgtgggacggcccggctgcgatcgccttcaccgacggccgcaagatcggcgcgacgctcgatcgcaacggcctgcgcccggcgcgctacctcgtcaccaaggacgaccgcatcgtgatggcgtccgaaatgggcgtcctgaagattccggaggaccagatcgtcaccaagtggcggctgcagcccggcaagatgctgctcgtcgacctcgagcaggggcgcctgattccggacgacgagatcaaggccgacctcgccaagagccacccctatagcgactggctgcatcgcacccagatccagctcgaggagctgccagacgcgccggccaagggcgtgcgctcgaacctcccgctgctcgatcgccagcaggcgttcggctacagccaggaagacatcaccatcctgatgacgccgatggcgtccaccggcgaggaagccgccggctcgatgggcaacgacacgccgatctcggcgctgtcggacaagccgaagcagctgttcacctacttcaagcagaacttcgcccaggtgaccaacccgccgatcgatccgatccgcgaggaaatcgtcatgagcctcgtctcgatcatcgggccgcggccgaacctgttcgacctgcagggcgtcgcctcgaccaagcgcctcgaagtgcggcagccgatcctgaccgatgcggacctggagaagatccgctcgatctccgacgtcgccgagacccacttcaagtcgcgcacgctcgacaccactttccacgccggcttcggcgcggcgggcatggagcaggtgctcgacgagctctgcgcgcgcgccgagggcgcggtgcgcgagggcatcaacatcatcatcctgtcggaccgcatgaccggcaccgaccggatcccgatcccgtcgctgttggcctgcgccgccgtgcatcaccacctgatccgcaccggcctgcgcacctcggtcggcctggtggtcgaatccggtgagccgcgcgaggtacatcacttcgcctgcctcgccggctacggcgcggaagcgatcaacccctatctcgcgttcgaaaccatccttgcgatgaaggaccggctgcccggcgcgctcgacgactacgagatcgtcaagcgctacatcaagtcgatcggcaagggcctgctcaaggtgatgtccaagatgggcatctcgacctaccagtcctattgcggcgcgcagatcttcgacgcggtcggcctcaaggcggacttcgtcgccaagtatttcgccggcacccacaccaggatcgagggcgtcggcctcggcgagatcgccgaggagaccgtgcggcgccacaccgacgcgttcggtgacggccagatctacaagaccgcgctcgatgtcggcggcgaatatgcctaccgcacccggggcgaggaccatgcctggaccgcggaatcggtctcgaccctgcagcatgccgtgcgcggcaactcgcaggagcgctaccgggcgttcgccaagatcctcaacgagcagtccgagcgcctgttgacgctgcgcggcctgttccggatcaagagcgccgaggacgacaagcgcaagccggtcaagctcgaggacgtcgagccggccaaggacatcgtcaagcggttctcgaccggtgcgatgtcgttcggctcgatctcgcgcgaggcgcatacgacgctcgcgatcgcgatgaaccggatcggcggcaagtcgaacaccggtgagggcggcgaggagtccgaccgcttcaagccgatgccgaacggcgacagcatgcgctcggcgatcaagcaggtcgcctcgggccggttcggcgtgacgacggaatacctcgtcaactccgacatgatgcagatcaagatggcgcagggtgccaagcccggcgaaggcggccagctgcccggccacaaggtcgacgcgaccatcgcgcgcgtccggcactcgacgccgggcgtcggcctgatctcgccgccgccgcatcacgacatctactcgatcgaagacctcgcccagctgatctacgacctcaagaacgtcaatccggacggccaggtctcggtcaagctggtgtccgaagtcggcgtcggcacggttgccgccggcgtcgccaaggcgcgcgccgaccatgtgacgatcgcgggcttcgagggcggcaccggtgcctcgcccctcacctcgatcaagcatgccggctcgccgtgggagatcggccttgccgaaacccaccagacgctggtgcgccagcggctgcgcagccgcatcgcggtgcaggtcgacggcggtttccgcaccggccgtgacgtcgtgatcggcgcgctgctcggcgccgacgagttcggcttcgccaccgcgccgttgatcgccgccggctgcatcatgatgcgcaagtgccacctcaacacctgcccggtcggcgtcgcgacccaggatccggtgctgcgcaagcgcttcaccggccagcccgagcacgtcatcaactacttcttcttcgtcgccgaggaagtccgcgagatcatggcccagctcggctacaagacgttcgacgagatggtcggccaggtccagatgctggaccagaccgcgctggtctcgcactggaaggccaagggcctcgatttctccaagctgttcgtgcggcagaaggaggagaagggccagacgatctatcactcggagagccagaaccaccatctggaagccgtgctcgaccgccggctgatcgagcaggcgcaggccgcgctcgatcgcggcgcgccggtcaggatcgaggaagagatcaacaacaccgatcgttccgccggcgcgatgctgtcgggcgcggtggccaagatctacggccatgccggcctgccgctcgacaccgtccatgtcggcctgaagggcaccgccggacaggcgttcggcgcctggctcgccaagggcgtcaccttcgagctcgagggtgaaggcaacgactatgtcggcaagggcctctcgggcggctgcatcatcgtcaagccgccgaagatctccggcatcgtgccggaagagtcgatcatcgtcggcaacaccgtgatgtacggcgcgatcgcgggcgaatgctacttccgcggcatcgccggcgagcgcttcgcggtgcgcaactccggcgcggtcgcggtcgtcgaaggagccggcgatcattgctgcgaatacatgaccggcggcatcgtggtcgtgctcggcaagaccgggcgcaacttcgcggccggcatgtccggcggcatcgcctatgtgctggacgaggccggcgacttcaacaagctctgcaatctgtcgatggtcgagctcgagccggtgctgtcggaagagatgatcaacgccgacacctaccaccactccggcgatctcgaggcgcatggccgggtcgacgtgttccagaacctgctcgactccgacgtggagcggctgcatgtcctgatcacgcgtcacgccaagctgaccggctcgaggaaggcggcggagattctcgccaactggaaggcctggctgcccaaattccgcaaggtgatgccggtggagtaccgccgcgcgctgaaggagatgaaggccaacgccgacgccgagccgaagatcgcgatcggcgcctaagtcacaccacgcgccattccgggccgcgcctggcgcgaacccggaattgcgcaaagccacttcgagacttcgggtctgcgccccgcggcgcagcccggaacgacggaacaactgagatgcaggggcatcgggtttcaatgggtaagatcacaggttttctcgagatcgagcggcatgaccgcaagtacgagccggtcgccgatcgactcaagaccttcaacgagttcgtcattccgctgagcgagaaggacacgcgcgaccaggccgcgcgctgcatgaattgcggcatcccctattgccacggcaccggctcggtccagccgggcacgccgggctgcccggtcaacaaccagatccccgatttcaacgacctcgtatatcagggcaactgggaagaggcctcgcgcaacctgcactcgaccaacaacttccccgaattcaccggccggatctgcccggcgccgtgcgaggcgtcgtgcacgctgaacatcgacgacaacccggtcaccatcaagaccatcgaatgcgcgatcgtcgaccgcgcctgggacaatggctggctgaagccggagatcgctccccagaagaccggcaagaaggtcgccgtgatcggctccggccccgcgggcctcgccgcagcccagcagctcgcgcgcgccggccacgaggtgcatgtctacgagaagttcgccaaggccggcggcttgctgcgctatggcattcccgacttcaagatggagaagggcatcatcgaccgccgcgtggcgcagatggaagccgagggcgtcaccttccactacggcaaggccgtcggcggcagcaccccgggcgcgatcgatccgcaggagctggccaagcagtatgacgccgtggcgctgaccggcggcgcggaagccccgcgcgacctgccgatccccggccgtgatctttccggcatccacttcgcgatggacttcctgccgcagcagaaccgccgcgtctccggcgagccgctgaatggtgccgccgacatcctcgccggcggcaagcatgtcgtcgtgatcggcggcggcgacaccggatcggactgcatcggcacctcgttccgtcagggcgcgaagtccgtcacccagctcgagatcatgccggcgccgcccgagcacgagaacaagggcctgacctggccgaactggccgctgaagatgcgaacctcgtcgagtcaggccgaaggcgcggtgcgcgaattcgccgtgctgaccacgaagttcgaaggcaaggacggcaaggtcagcaagctgcattgcgtcaaggtcgacgacaagttcaagccgctgcccggcaccgagttcacgctcgacgccgagctggtgctgctggcgatgggcttcgtccatccggtgcacgagggtctgctcaagacgctcggcgtcgagctcgaccagcgcggcaacgtccgcgcatcgctgcaggactaccggacctcgcgcgccaagatcttctcggccggcgacatgcgccgcggccagtcgctcgtggtgtgggcgatccgcgaaggccgccagtgcgcgcgctcgatcgacggcttcctgatgggcaagaccgacctgccggggtaagccctcggcagacacgtcgaactgcatctcacaaacgctgctgtcatcgcccgcgaaagcgggcgatccagtattccagaaacgtcagagattgagccgagaggccgcggcgtactggatgccccgcctgcgcggggcatgacagttcacgcgtggttcgacttgcgtatcctcaccgctagttctgcacccgcacgcccagcatcacgaccgtcgatgccgagctctgtccggccaagttcgaatccagccagtcgcggcgcagggtgcccttgatccacaggctgcgggtcatcttgtagatcaaatcggccgacaccgagtagatcgtgtcgttgcggttgtcgcccttgtactcgagcgtgccgtagctgaacttgccgatcgcggtcagccagcggcggaagtcgtggtcgacctcgatggtgtaggtgcgcgacagcacgccggaggtgcccggcagcgtggtctcgccgagctgggtgtcggaatagaatttggccgtggtcagcggcgtcgcggtccaggtcagtgaggccgtggtgagcaggccttcgagccggttgagccttgtgtcggcgtagtcgcgcatcgcgtagccgatcgagacttcgccgaacaacagccgggtgaactcgaacgaggtgccggccttggcatagccgcccgatgaatcgcgcgcgtagccggcgcggtcgaggaagagatcgtggacgcggctgtcgccctgcacctcgatgaagggcttcaccgccgggttgagctcgtagctgacgcggccgacgccgccatattgggtgaagttgcggtcgtcgttcgacgacgaggtgccgtcggtcagcttcgaccattggtagtcggtgcgatcgacggtggcgccgagcgagacctgcatgcggttgaaattctggtcgatgccgaaggtgccgccgaccgtagagtagagcggatatttggcgaggccggcctgcacgttcgggctgccgggattgtcggtcgagaccagcatgcgggcctgcgccgtgagatgggtgtccctcgagacatcgagacggccatcgatatggccggtgaagctcggacggtcgacgtcgagcggtgccgacagcggcgtgccgtcaatctgcgtcagctgggagccgtagccggtgaaggagccgcgcagatcggcgaccacggcgtgacgctcccagtccgagatcgcgacgaattccggcgccaccatgtagaacgccttgccctgcggcgaattcaagcggcccggattggtgtcgtagccggccatcacctcgaccgcggtcttgaccatgaacgagccggcgtagtcgccgaccgcgccgaacggatcgtcgtcgatcttgagccgcttgcgcggcggctgaccgacgatggtgccggccatcgccggcggcagcggcggcttgttggcggtctccgacggcgggatcgacagccgcaactgcccggccgcggtcagcggcggcggcggcggcaccggcgagccgggtcccggcggcggcttcggcttggcctggcctggatagtatttcggcttcaggcgtttgcgattgagcgcgtcatagcccgaggtcgcggcgccattggcggccggaagaccgtaagtcgggacctgcccgacacggtccgaggttgaggttgatgtcgacgacggcaaggctcgccggctcggatcggcgtccggcaatctgaggccgttgagcggatccatcgcgtcggcggtggtccggcgcagcggcgactccgggttgatcacctggctctgccggttggggctgaacaggtcgggcgtcacggtctgggcactgctgagcccggtcgtcgcgatcagctcaggagcagtcagcaaaagacatggcaaagccacgcgaacgagacgtccgcgccgatttgggccgcttgctggccgccgccacacgatggaaatactccaacgaattcatatacttgacatacgcatctcgccgggcggcgaaaaacgtcgttaatggagttaaaacaattatggttaatgagccgttgaggatccgccgccgcgcgtcgcgtcgcggaatcgaacgtgctaagggagatgcccgggtgcaaaacccctcccctggaatccgaaatggccaaaccgaaaccgctgatgaccaaatcatccggccccgatgacggcgccgttcagtcggcgctccgcaccctcgatgccgaagccagcggcgtcgctgcgctctccgcggcactccggtccgatctcggcgcgccgttcacggctgcatccgagctgatctgcaaggccaagggacggctgatcgtgaccgggctcggcaagtccggccatatcgggcgcaagatcgccgcgaccttcgcctcgaccggcacgccggcgttcttcgtgcacgcggcggaagcgagccatggcgacctcggcatgatcaccgccgacgacgtgatccttgcgctgtcatggtccggcgagcagcccgagatgcgcaacctgatcgcctatgcggcgcgcttcggcattcctctgatcgcgatgaccgccgacaaggactcgacgctgagcaaggccgccgacgtgcagctgacgctgcccaaggcccgcgaggcctgtccgcacaatcttgcgccgaccacgtcttcgctgatgatgctggcgctcggcgatgcgctggcaatcgcgctgctcgagggccgcggcttcacctcgaccgatttcagcgtgctgcatccgggcggcaagctcggcgcgctgctgaaatatgcccgcgacctgatgcacaccggcgacgcgctgccgttgaagccgctcggcaccaagatgtcggacgcgctggtcgagatgacgtcgaagggcttcggctgcgtcggcatcgtcgacagccacggccatctcgccggcatcgtcaccgacggcgatctgcgccggcagctgacgcgccccgacctgctgacgctgtcggtcgacgaggtcatgaccaggaccccgaagacgatcggccgcgacacgctggccggcgaagcgctcgagctgctcaacgcctccaagatcacgacgctgatcgtgaccgatgccaagaagccggtcggcatcatccatctgcacgatctgctgcgcgccggcgtggcgtaggttcctccgtcattccgggctcgccgcttcgcgtcgccctcagatgcgcaattgcgcaccggggaatgacgctcactgcggaaaccgcgccgcggtcgcctccagcggcagggcgagcgcgttggcgaggtaggagacggtgcggtagaagccgcacagcaggatgatctccagcacctgatcgtcgtcgtagtgtgctgacagcgccgcgaactccgcgtcgtccagcgtcgcacgcgcgtgcagcgcatcgaccgccgcgatcagcgcctgttcggccggcgaccagcaatcggcatcggcgttgccgcgcacggtggcgtggacctgttcttccgacagcccggccgcggcgccgaacgccgtgacatgcacgccccattcatattcgcaggcgttgagcgcgcaggtgcggtcgatcacgatctcgcggtcccgcaaggagagcggcccgcggtcgagcaggctgccgccgcgaaacttctcccacgcgcgcggatggccggccatcgtgcggaacagcaccagcggcggcttgccgcgcatgatgcggtcgaaatgtgctgttgaacgtccgccgcatagggcggatcgagcggcgcgatgcgtgacatgggctgatcctgttgctacatttaatgtagcgatacgctacaatatctgtagcggtgtgcaagagagattcgagcgggagcgcgacatgccgaagcaggttccgagcgcaaaaccgagcgtccgcggctcgcggtccggccgcccgatcatggcgctgctcgatctgttgggtcggcgctggaccttgcgcatcgtctgggagctgcgcgagggcgcgctgacctcgcgtgcgctgcgcaccgcctgcgacgaggcctcgccgaccattctgcaaacgcgattgaccgagctgcgcgaggccggcttcgtcgagttgtcggaggaaggttaccgtctcaccgcgctcggctgggagctgtttgcgaccttcacaccgctcaaccgcttcgccgagcgctggagcaggcaggcaggcagctagaccgcggccaccgtcaggctggcgccgtcggcgcgcaccaccttcacgcggcttcccgccggcgcgtcggggccggcgacgcgccagaccgtgtcgtcgatccgtacagtgcccgatccgtcgacaatcggcttctccagcgtgaactcgcggccgaccagggcttcgttgcggcggttgaggaacggattgctcctgctcgcctcggtcgctcccctggcaaaatgccgccaggccggcaccgcgagcgcggcaaacaccgcgaacatcaggagttggatctgccaggatggcgtgaacacgaaggacagcaggccgaccacgagcgccgcgagcccgagccagaacaggaacaccccgggcgctgcaagctccagcgccatcaggatgaagccgaagatcagccagttccaggtacccaatgtcgaaaacatctcggccatgacgtgacctctaccattgtggacgcgacgccgtcacgtcctcaccgctgcggcggcaccggcggtggcggcgtcggaccggccggcggcaccgagccgcggcgcgcggccgccgcagccgatgcggcgctctcgccgaaggtcgccttggcgatctcgccaataccggcgagcgagcccaggatgctggtcgcctcgatcggcagcatcagcaccttctggttcggtgaatcggccagttgcccgaacgccttgatgtacttgtcggcgatgaaatagttcagcgccgcgacgtcgcccttggcaatcgattcggagaccatctgcgtcgccttggcctcagcctcggcggaccgctcgcgcgcctcggcgtcgcggaaggcggcctccttgcggccttccgcctgcaggatctggccctgctttgcaccctcggcgcgcagaatctccgactgccgctgcccctccgcctgcaggatgtcggcgcgcttgacgcgctcggccttcatctgccggcccatcgcctcgaccaggtcggccggcggcacgatgtccttgatctcgatgcggttgaccttgacgccccagggcgacaccgcggcgtcgaccacgcgcagcagccgctcgttgatctcgtcgcgatgcgacagcacctggtcgagatccatcgagcccatcaccgagcggatgttggtcatggtcaggaccgtgatcgcctggttgagattggcgacctcgtagctcgccttcgcggcgtcgaacacctggtagaacgcgacgccgtccaccgtcacggtggcgttgtccttggtgatcacctcctgctcggggatgttgatcacctgctccatcatgttgatcttgcgcccgatgcgatcgaaatagggcacgatcaggttgaggccgggcgacagcgtgcgggtgtatttgccgaaccgctcaatggtccagtcatagccctgcggaacggttttgatcccggcgaacagcgtgacgatgacgagaagaacaaacgcgatcgcgaaaatgtcgaagccagtcatgaagtcctccaggcacggtcgtgcattggtcggcaggaccgcttcgccggttcagccggctgttgttctccctagcacataggaggcggtcgtgcgggccaccagatgcacgaaggctgaacgaaccgcgatgtcggttgtcacggatcgttaacaaagcgcttcagccttgctagatccagccctgaagctcgcgcaacaccagctggcggatcacgtccatgccgccgacgctgtcgttgagacaggggatcgccgcgaactgctcgccgccatgatgccggaagatctcggcattctcctgggcgatctcctccagcgtctccaggcagtcggcggagaagccgggcgtcaccacggcaatacgtcgcacgccgtccttcgccagcttctcgacggtcttgtcggtatagggctgcagccactcggcattgccgaaacgcgactggaaggtgaggatcagcctcgaggcatcgagcccgagccgcttgcgcagcgcgttggtcgtggcaatgcactgcgcctggtagggatcgcccttgtcgacatagtccttcggcatgccgtggaacgaggcgaggatgacctccggctggaacggcaacgtcgcaagatggtcgttgatcgagaccgccagcgcctcgatgtaatcggggtcgtcgtaataaggcggcgtcacccgcaagatcggctgcgcgcgcatgccggccagcacgcgaaacacctcgtcgcagacggtcgccgacgtcgccgcggaatattgcggatagagcggcaccaccagcagccggccgcagccctgcgccgccagcgcctcgatccgttccttgatcgacggattgccgtagcgcatcgcccagtcgaccacgacgtggtcgtgatcggcgatcgcctccgccagcttgtcggcctgcgagcgcgtgatggtcttcagcggcgactcgttcttctcggtgttccagatcttcagatagtcgcgcgccttgcgggccggacggacgcgcaggatgatgccgttgaggatcagcttccagaccaggccctgattctcgatcacccgcggatcggacaggaattccttcaagtagacccgcacgcccgcggcgtcggcggtatccggcgtgccgagattgaccagcagcacgccgacccgctccggcttcggcgccgcggcaggcttcgcactctcgaagggaattaccgtgctcatgatggccttgcgcctaaaatccttcgcttggggctttgggcttcgcgcgttgctccaaccttgtcaagcagagcgcgagttggctaccttccgccccgtgaatggggggaaccatgacgatcgccgaatggtgcgtcttcgggacgctgatgctttcgctcctgacgatcgtatcggtgaaatggatcagctttcgcagcttcgacaattccaggccgcgcgatcccgatttctacgacgacccgatccgctcgcgggcgctcggcgcccaccagaacggcatcgagaccttcccgttcttcgccttcgccgtgttgctcgccgaataccgcgtcggcccgctgcggctgatcgacgaactcgcggtgctgttcctgatcgtgcggatcgcctacgtcttcacctatatcggcaaccgcccgacgctgcgctcgatcctctggagcatcggtttcgcgatcaacatcgcgatcttcttcctgccggcgatcaggggatatctgacgagctgagttgcctctctccccgcctccgttcctagtgaggtgagtgcgccggtcaggctccttctccccctgcggaagagggtggggagaggggtggccccgggcgagatgtacgagggcgagcaaagctccatcagccaacatctcgcacgccgcctggtaagcgctcgcacccaacaagcagtggagcaagcggcacccctatccctaaccctctcccgcaaagggagagggaaccctcgcagcgatgcgcccctcactcaggagacctctccccgcaagcaggcgaggtgacctcacaagcacgtcgcccgttcggccgcgacatagccgaacagcagcccgagtccgaacagcagcaccagaccggcggcagcgaattccaggccgcgcatgatcagcatgccgccgccgtcgcgcaccgcgctcagccgctcggccatgccgcgcgccgacaccgcaaccagcgcgatcgcggcgaccgtaatggcggtgccgaaccccatcgcgaaggtcgcggcaatgccagcccagaacaggccctgcgccagcgcgaacaccagcaccaggatcgcgcccgagcacggccggattccgaccgtcaggatcgcgctcagaccacgccgccagccgcccgggcctgcgagctcggccggcgtcggcccgtgcgaatggccgcaatgctcgtcatggacgtgttccgcgtcatgatcgtggtcgtggccatgatgctcgtggtggtgatggccgtgatcgtcatgcgcgtgacgatggtgatcatggccatggtcccggtgcacgtgatcgtgatggtcatggtcatgctgatgcgtgccggccaacgccagcgccggacgcggcagctggagcgcccggaaaaaaccgccgcccttgacccagaccagccgggcaccgaacgctgcgatcagcgcgtagctggcgatttcgatcgccttctccgccccgcacatcgtcctcgccgtcgcattgagcagccaggcgcagacgccgacgatggcgaccgcgaccagcgactgcatcagcgccgaggcgaacgacagcacgacgccgcgccgggccgtctcgcggttggcgaccatgtaggacgagatcaccgccttgccgtggccgggaccggcggcatggaagatcccgtaggcaaacgagatcgcaagcagcgtccagaccgccgagccatcggacttcgcggcgcggatggtctgcgagatctcgcggtagaactccgactgcttggccaatagccagccgacgatcccgccctgcggctccgccgcgcgcggcgcaccgaacggattctgcgccagcagcgcatgaaccgtgccgtcgagcagcgcgaacccggtcagcacggcggccgaaagcgcaagaccgcgcatcgcacgagagacgttctgcgtcatgggcactccaccgtgatcttgttggcgaacatcatgccgaaattgccgttgctgccgtcgaggaagttctgctcgccgagcttctgcgcggcggcggtgccgtcactgttcggccgctcgaactgcatcttgcagtcggcggcggcaccgaccagcttgaccggatccttatcggcgaactggaaatcgatgaaataggtcgggtcgaacacttcgagcgagagcttgctggccttgaacggcgtcttcaccggcagggtgaagtgcagcgtcagcgccgagtccttgtactcgaggaaatagtcgaccggctcggtgaacttctgcttcttgccgtcgcccttggcgaaggtgaagtaggcgtattccttcagcgactcgacattggtctgggccagcggcgccagctcctcgcggctgtaggcacccttcaccttggtctcgatgccctgcagcgcataggtcgagaacatgtcgtcgaaggtccaggcgtggcggacgccggtgatggtgccgtcgggcgcgtagatcacttcgcttttggcggtgatccagacatgcggatgggcctcggccgccgccgtgccgagcacgacggtgaccgcgagcacgagccaggcgatcggccggctgagggacagcctcaccttcaggccgcctctggcgtctcgagcaggccgcgccggcgcagcagggcatccggctccggttcgcggccgcggaaggcgacataggcctcctccggatcgcgtgagccgcccgacgagtagatgtcgtcatgcagccgcttggcggtcgccggatcgaagatgtcgccggcctcctcgaaggcgccgaaggcgtcggcgtccatcacctccgaccacatgtagctgtaatagccggaggcataatggtcgccggagaagatgtgaccgaactgggtcggccggtggcgcagcgagatttccgcgggcatgccgatcttctccagctccttctgttcgaaggcgcggacgtcccggctcgccgccgccggctgggtgtggaattcgaggtcgaccagcgccgaggagacgaactcgacggtggcaaagccctggttgaacttgcgcgcggcgaggaagcgcttgagcaaatcgtccggtagcgcctccccggtctggtagtggcgggcgaagcgctgcaacacctcgggccgttcctgccagtgctcgtagagctgcgagggcaactcgacgaagtcggtgaacacggacgtgcccgacagtgacgggtaggtcacgttggagagcatgccgtgcaggccgtggccgaactcgtggaacagggtccgcgcatcgtccggcgacagcagcgacggcgcgccgtcggcgcccttggcgaagttgcagacattgatgaccagcggcgcgacgtcgccgtcgagcttctgctggtcgcgcagcgaggtcatccaggcgccggagcgcttcgaaggccgcgcgaagtagtcgccatagaacagcgccttgtgctggccatcgcggcccttgacctcccagacccggacgtccgggtgccagaccgggatgtccttgcgctccgcgaaggtgacgccgaacaggcgggtggcgcagtcgaaggcggcctcgatcatgtggtcgagcaccagatagggcttgatcgcggaatcgtcgaaattggcgcgccgctggcgcagcttctcggcgtagtagcgccagtcccaggccgccaaggtgaaattaccgccctcctccgtgatcagcgcctgcaacgcgtcgcggtcggcgagcgcccgcgcccgcgccggcttccagacccgctccagcagaccgcgcacggcctccggcgtcttggccatggaatcctcgaggcggtaggcggcgtaggtcgggaagcccaggatcttcgcagtctcctcgcggagcctgaggatctccacgatggtcgcgttgttgtcgttggcgttgccattgtcgccgcgggcggtgaaggccttgtagaccttctcgcgcaggtcgcgccgctgcgagctctgcaggaacggctcgaccgaggagcgcgacagcgtcacgatcgccttgccggccataccgcgctcttccgccgcagccttggcagccgccacgaatgtgtcggagaggccggcgcggtcgccctcgccgagttccatgaaccattgctgctcgtcgccgagcagatggtggctgaacgaggtgccgagatgggcgagccgctcgttgatctcggccatccgtacttttgcggcctcgtcgagcccggcgccggagcggtggaagcgggtataggtacgctccaagagccgcatctgctcgccggtgaggccgagcgaggcgcgcttctcgtgcagcatggcgatgcggccaaacagcacagcgttcatcatgatcggattccagtgccgcgccatccgcggcgacacttccttgtcgatctccaggatcgccgggttggaatgcgccgacaccaggtcgtagaacacggccgaaaccttcgacagcagcttgccggaacgctccagcgccgtgatcgtattgtcgaagtcgggcagcgccggatcatgggtgatcgcagccacttccgccgaatgatcggcgaaggcctgctcgaaggcgggcaggaaatgctccggcttgatctcggcgaagggcggtgtctcgagcggcgtctgccacgccttcaggagggggttggcaatagcctctgcgctggtttctgacatcgaatgtcccgtttttcgccttgaaaatgcggcccaatctatatcacgcgatacggcatttttgggccttttgcgcttgatagatgggctcttttcggagagattgcgccccctgaacaggacctatttcatgaccatgcagccctccgcctcaggcaacagccggatctactggccgagcgtcatcacggtgatctcggcggcgatcctgatcggcgcggaagtattcggcgcggcgttcgccggcggctgggcgctcgcgatcctgtttggactcaacgacaccggcgcgcacatcctgcaggccgtgctgttcggcctcggcgtcctgatcatgatcgccttcatccgcggcgcgcagcgcatcgagccgttcacgcgtcgcgcgtgagttcgtgcgattcaagaaagcgctgcggcacagggctaaaacgcacacgcttcgttagccattcttaacggccgttcatcttcagcgactgctcgacgcgccatcgcaagcgcgcgttagggaaatttgtcgctatcgcaaaaaaattcttgcgaagcgaattcaaaagacttatttcctgccttgcccaatttcgcacgtgcctgtggtcgtgtgtcagtcggtaggtatccggacaagaggccggacagccgccaaggggtggaagaaccgagggtcgcttacgtccatttggacagtccatctggacacgaggcggccagcatctctctccagggatgccttgttgaaggtctcgccactctttgcaaccgtgactggcagccggaggcgaaccggcgcaccccgctctccacgggggacgcgacttaaagcaacgacggatcgggcttttttggtctctaccggcagtccaacgccggcgcgggctactgaaaaggcttgtccttcattgccaggtgagcgggcgggaaactctcccaaccaatccacggcagcacagtctggtttgagtcttttggcctcgacgcgcctccatcgcgcgatgtggccggagcgctctcacccgacgtcacgttgatgcggatcccgtcgctggggccgctggagagtgccatgactgaacgtatccaggaattcctgcgcaaccgccgccaggatggtctcgacaccgagccgtgcctcgtcgtcgacctcgaagtcgtgcgcgacaactaccagacctttgccaaggcgctgccggacagccgcgtgttctacgcggtgaaggccaaccctgcgcccgaagtgctgtcgctgctggcttcgctcggctcctgcttcgacaccgcgaccgtcgcggagatcgagatggcgctggctgccggtgcgacgccggaccgcatctcctatggcaacacgatcaagaaggagcgcgacatcgcgcgcgccttcgcgctcggcattcgcctgttcgcagtcgattgcgccgccgaggtcgagaaggtcgcccgcgccgctcccggcgccaaggtgttctgccgcatcctctatgactgcgccggcgccgagtggccgctgtcgcgcaagttcggctgcgatcccgagatggcggtcgaggtgctcgacctcgccaagcgccttgggctggagccgtgcggtatctcgttccatgtcggctcgcagcagcgcaaggtgaaggcgtgggaccgcgcgctcgcgatggcctcgaccgtgttccgtgactgcgccgagcgcggcatcaacctcaccatggtcaacatgggcggcggcttcccgaccaagtatctcaaggacgttccgccggtgctgcaatatggccggtcgatcttccgcgcgctgcgcaagcatttcggcaaccagatcccggagacgatcatcgagccgggccgcggcatggtcggcaatgcgggcgtgatcgagaccgaggtcgtgctgatctcgcgcaagagcgacgaggacgaggtgcgctgggtctatctcgacatcggcaagttcggcggtctcgccgagacgatggatgagtcgatccgctacgcgatccgcaccccgcatgacggggcggacatgacgccgtgcgtgctcgcgggcccgacctgcgatagcgccgacgtgctgtacgagaagctgccgtatccgcttccggtgacgctcgagatcggcgacaagctgctgatcgaaggcaccggcgcctatacgtcgacctactcgtcggtggcgttcaacggcattccgccgctcaagacctaccacatctaaaccgcctcgaggtcgaggcctgatgaaccgggagccggccccgccggctccttaccgatcatttttgatttttccgaacgacgcttgctgcggcgtacgccatgccgttgcaagcggggactgacgtgccatgactgcaaaacggaacaccgccgctgccctcatccgaagagccgccccgttcgcgatccgtgcggagcgtgcctcggacgtcgtcgcgcgcgaagcgctgctggatgcctgctttggcgagaaccgccaagcgcgcacctgccagcgcctgcgtgacggacgcgcgcccgcccaaggcctgagccttgccgcggtgcgccagggcgaccggttggtcggaaccgtgcggctgtggcacgtcagcgcgggaggccgcagcgcgctgatgctggggccgctggcggtcgacgacgactgccgcggcctcggcgtcggcgccgcgctgatgcagcgcgcgctggctgtggcgaaggcccgcggccatggcgccgtgatcctgctgggcgatgcgccctactacgcccgcttcggcttcaccgccgccaagaccggcgagctgtcgctgccgggcgcgttcgagcgcgaccggctgctcggcctcgagctggtcgagggggcgctggacggcgcctggggcatgatcacgccggccggcgcaccgctgttgcccaagagaccattgctcaagaccaaggcatcccgttcccgaaaggcaccgctcgccgtgccgcacgcggcgtagggcgggcaccatgtcggagagccttcccgcaatcgatggcgcgcgcccgcgttggcgcggcctcgtcaccacgatcatgctggtcctgatctcggtcatgatcgtccgggacatcctgatccggcgctgggccggcgcgccgccctcgccgccggacaccacgcagcagtcccgctagccccagccgtcaggcttccaggtcagaatccgaggggttgcgcgggcggcaagaatgcccgtaaaccccgcgcacagccattttccgtcgaggtccagcatgtcccgccgcctgatttccaccggctcgccgttcgagaagaccgccggctacagccgagccgtgatcgacggcgatttcgcttttgtcgcaggaaccaccggctacgactacaccacgatgaccatgccatcggatgtcacgagccagtcacggaactgcttcaagaccatcgaggccgccctcaaggaggggggcttcgcgatggccgacatcgtccgcgcgacctactacctcaccgacgtcaacgacgcggatgcccatttcttggtctgtggcgaggttctcggcgacatccgtccggcggcgacactgctgatcgtggccgggcttctgaagcccgagatgaaggtcgaaatcgaagtcaccgcaaagcgacgcaatccctgatccactctacccgccgctcggcgctctcctggagaaaatgatgagcccctcctcgcagatctacgcgaaaatcaccggccccattgtcatgatcggcttcggctcgatcggcaaaggcacgttgccgatgatcgagcggcatctcgattacgacaagtcgcgcatcaccgtgatcgatcccaaggacgagggccgcaaggcgcattgcgagaagcacaacgtaaaattcatccagcaggccgtgaccaaggacaattatcgcgacttgctgagcccgctgctcaccgaaggcggcggccagggcttttgcgtcaatctctcggtcgataccggctcgaccgacatcatggagctctgcaacgagcttggcgcactttatatcgacaccgtcaacgagccctggctcggcttctatttcgattcgtcgaagggtcctgaagcgcgctccaactacgcgcttcgcgaagtgacgctggccgccaagaaggcacgccccgcgggctcgaccacggccgtgtcctgctgcggcgccaatcccggcatggtctcattcttcgtcaagcaggcgctgctcaatgtcgccgccgatctgaagctcaatgcccccaggccaaagaccaaggccgagtgggcggacctgatgcggcaggcgggtgtcaagggcatccacatcgccgagcgcgatacccagcgctccaagtcgccgaaggagcccgatgttttcgtcaacacctggtcggtggaaggtttcctgtcggaaggcgtgcagccgtccgaactcggctggggcacccatgaaaaatggatgcccgagaatgcacggacccacgaagccggctgcggcgcggccatctacctgatgcagcccggcgccgacacgcgggtgcggacctggtgcccgacccgcggcgcgcaatacggcttcctcgtcacccacaacgagtcgatctcgatctccgattacttcacggtgcgtgatgcatcaggcaccgcgatctaccggccgacctgccactacgcctatcatccgtgtgacgacgcggtgctgtcgctgcatgaaatgttcggccgcgccgccaggatgcaggagaagcaccacatcctcgacgagaacgaaatcgtcgacggcatcgacgaactcggcgtgctgctgttcggccacgacaacaacgcctactggtacggctcgcagctctcgatcgaagaaacccgcaagctcgcgccctatcagaacgccaccggcctgcaggtgacctccgccgtgctcggcggcatggtgtgggcgctggagaatccgaacgagggcatcgtcgaagccgacgagatggatttcgaccggttgctggaaatccagctgccctatctcggcccggtgaagggcttttacaccgactggaccccgctgacggatcgcccgggactgtttccggaagacatcgacaccagcgatccctggcagttcaagaacatcctggtgcgctgacccgacccgatctccactctcgtcattccgggatggcccgaagggccaggcccggaatgacggcagctatttcgctatatagtcgaacgccaccgagccgagaccgagcgtaagatcggccttgtagtgcagcgccgagaccacctcgcgcaccggcaggcgggcgacgtcgcacagcgcgtgaggaaacaggccgagcgcggcggggccggtccatgcctccttcaaggtgatgtcctcgagatgaaaccgcaccagctcgcagatccgcgggctgccgtcgacatgcgggatgatcttgagaataaagttcggcgccgccatcgatttcagcacggtgtcgtggtcgaccttgcgatgcttgtagcccatggtggcggaggcgcacagcaccgagccgtaatgcagcgagccgaccaggacgtcgctctcgacctcgatcctgggcttggccagcttcttcggaaatccccacagctcgcggccgccggcgatcgggccctcgtcgtcgagatacatcgcgtgggtgtaggcgcccaattcgcccttgaagcggaccgggatcacctgcccggtctcggtgtagtcgccgaagccggtcgagtccggcatgcggatgaattcatacttcaccacgggctcggcaacctcgagcggctccggcaccacggcctggagcgcttccggatcggtcttgtaggtgatgatgaaatattcgcggtcgaagaaccggtacggccccggcggaaacgacgggttggtgagcggcatcgaataggcggtgcgccggacgtcctcgatcttcatggatggccccatctgtcgttggcaagacgacggattatggcgggcggggatgacggaggcgagacagtataatcggcagcatcagtcaaatgcgcgtcacatgcgccgaccggagagcctatttcttctcgatcggtggtgcggtcttctcggcgggcgccggcggcagcaccggcttggcgccggccttctgcgcctcggcatcgggacgcgccggctccggcgccggcgtggtcggccgttcgccgccgggtcttgactcggccggcggcgcggtcttcggcggcgccggcgatggctgtagcggctgggctgcctgcgccagctcttgcggcgaagatgcgttgattgcctgcagcgacagcacggcgaccgcgacgcctgccaccaccagcgtggaggcgatcacgacgtccgcccgcaacttggttcgatccgcagccatctcgttcaccccgcatcgtgtcagcgaggtcaacgatccggccaccgcatggttcctgggcgccgcctgcgtggaaccgcctcaatccgtggtgctgatttcccaggtcgcgtggcgcacgccgggctgatgttgcatgtcgaccactaccgcgttcagctcgttgggttcgaccgcggtcgagaccagctccgccacgatctcgaggaagtcgtcgccggcctcgaccacgttgacatcggcgaccggatagttcgcggcctcgagcttctccacgacggcgtcgcgcacatcgggcagcacctccgcggtgaccacgaccttgaagtagtaggtcgcctccagcgccttctcgttgagcgggatacggttgatggcgttgaccagcggacgcagcagcgtgttgccggcgatcacgaacacggtcagcgccgcggcctgcgccaccaggtcggcgccggcgcaggagccgaccgcggccgaggcccacagcgtcgccgcggtgttgaggccgcgcacgtccatgccctgcttcatgatgacgccggcgccgaggaagccgatccccgacacgacataggcgatcacccgcaccgcgccgtcggcgcccgccagatgcatcgcgaggtcgacgaaggcggccgcgccgaccgcgaccagcacgttggtgcgcaggcccgcggtgcgctgccggtactgccgctcggccccgatcagggtgccgagcacaaaggccgatgtcaggctgatcagcgtgtcgaggaagtcggcgagctggaatgtcgtgaggaatcgcatggcatctaccggttcttcatttgatgcgttttcttcacgcgaaccggtacccacttcgctcgaaaacgctgcgtatgcagcgatctcttacatttccagaatgcccgcgtcaccatcttccgtgccgaaggcgagcagcgtgcctttggcattccagcccagcgcagacaccgccgtgccggtattccgccgtaccaggatctcggcgccgtcctcgagccggaccatcagcacggtgccatcggcatagccgaccgccatgatgtcgttcttcggatggcaggcgaccacggcgacccgcgccggcatcggcgccagcatcgccggctccttgcccatcggcccgtccttgctggtgaacggccagacgatcacggtatcggcgcccgaggtcgcgagccccttgccgccgacgctccacgacatcgagcgcacccggcccggatagccgctcatccgcatgtgccggttgtcggcgagccgccagccatgcatggcggcctcgtgcatcgccgtgaccaggaacttgttatccgggctgaaggtgaccgcgagatgcgagccggcccattccaggaattccggattggcggccatgttgggaaaccacaacgtcacgccgttgtaatgcgcgatcgcgagccgcagccccttcggtgcgaacgccagcccgccgacggtcgacggcacctcgaacgttttttcctcgcccttgggattgcgcacgaaggcggtcttgcctgccgaccacgccacggtgccgtcgctgtgcagggcgacattgtcgatccagcgccgcttggcgtcgatcgcgactgtcgagatctcgcccttggcgtcgatcgcgatcagcttgccgtcgtcaccgccggtgaccagccgcttgccgtcggaggccgcgcacaggatggcaccgaaatgcgtctcggtgcgcgtgatctcgccgtcggcggttgcaatcgcaatgctctcctccgcaccgacgaagaacgcgcggtcgccgaggaaatgcaccgagccgaccgctgcgcccagcggaagcggcttgacgcggtcggtgatcgacacgatggaagattgggcctcgcccgggtcgaactccttcatcacgtggtgatgcactgctcgaagccgtcgcggatcgcctgctccggcagctcgcgaccgatgaacacgacgcggctctcgcgcttctcgccgtccttccacttccgctgatgatcgccctccagcatcatgtggacgccctggaacacgtagcggtcgtcatcaccggtgaaggcgaggatgcccttcgagcgcaggatcttctggccctcggtggcgactaggttctgcagccatggcatgaacttggtcgggtcgagcggcttctccgaacgcagcgacagcgactgcatgtcctcgtcgtgatagtgcttcaagccatgaccgtgatcatgatggtggtgatcatggtcatggtgatgaccgtggtcatgatggtgatggtcatggtcgtgatcgtcgccggcctcgaggaaatcgggctcgatctccaggatgcggtcgaggtcgaacgcgccgcgctccagcacgtcggtcaagccaacctgacaacgttcggtacggtgcagctttgcgtagggattgatgccgcggatgcgggcctcgacctcggcaagctcgggcttggagaccaggtcggtcttgttcagcacgatgacatcggcgaacgcgatctggttcttggcttccggcgcatccttcaagcggtcgctcagccacttggcgtcggcgaccgtgaccacggcatcgagccgggcgttcttctgcacgtcctcgtcgacgaagaaggtctgcgcgaccggcgccggatcggcaaggccggtggtctcgacgatgatggcgtcgaacttgcccttgcgcttcatcaagccgtccatgatgcggacgaggtcgccgcgcaccgtgcagcagacgcagccattgttcatctcgaacacttcctcatcggcgccgatgatgaggtcattgtcgatgccgatctcgccgaattcgttgacgatgaccgcgtatttcttgccgtggttttccgacaggatgcggttcaacagcgtggtcttgccggcgccgagatagcccgtcagcacggtcacaggaattttttgcgaagcttcagccataacaactccgggaacttgggttcgcgctcaaccccggcagggaggcccctgcccctacccggcgaccgcgctggtcagggcctttatattgtgcctgaccatatcaatgtaagtgggtgcctggcccttttcgcccgtcaaactgtccgaatacagggtgccgccgacccgggcgccggtctcggctgcgatccgctggatcaggcggggatcgctgatattttcgagaaaaactgcaggaattttcgcaagcttgatctgggcgacgatggcggcgatatcgcgcgcgctgggctcggaatccgtggagacgctgagcggcgagaagaacgtgatcccgtaagcgtcggcgaaatagccgaaggcgtcgtgggtcgagatcaccttgcgacgcacctccggtattttcgccaccgcctcgtgcacctcgcggtcgagcgcctccagcctggcgagataagcgtcggcattggccttgaagacggccgccttgtcgggggccgcggcgatcagtccgtcgcggatattggcaacgtagatcttcgcattggcgacggattgccaggcatgcggatcgtcatggccgcccagcttccgcggcatgatccccttggtggccaccgcgatcggcgccttgctgccggaggcctgcagcaggcgcggcagccagccctcgaagccgaggccgttgatgacgaggaggcgggcgtcggcgaccttcttggcgtccgccggcgtcggcgcgtagacatgcgcatcgccatcgggcccgaccagcgccaccacgtcgacgtcgttgccgccgacattgcgcaccatgtcggcgaggatcgagaaactcgcgaccacgttgatgcgttcggcggcttgtgccgcaccgctcgccagcaccagcgccagggatatcaagccaagcaaatgccgcatcattacgcctcgagatgccgtccgggaaacagctgccgcaccaggccgctgacattgccgaacagcagcgacacgatatagagacccgccgcaaccaggatgatcgcggggccggagggaatccgggtctggtacgacagcacgagcccggcatagccggaaacaatcgcgctagcgaccgcgatgcagatcatggtggtgatgtcgcgcgaccagaaccgcgcgatgcccgcaggcaggatcatcagcccgacgccgagcagcgtgccgagcgcgtggaagccgttgacgaggttgaccacgaccagcgccaggaaggcgagatgcgccggcgcaccggcccggctcacggtgcgcaggaacaccggatcgacgcattcgatcaccagcggccggtagatcaccgcaagcaccaagagcgtgatggtggcattgaatgcgatcaccagcagcgtctggtcgtccatcgccaggatgttgccgaacagcacgtgcaagaggtcgatgttggtgcccttgatcgagacgatggtgacgccgagcgcgagcgagaccaggtagaaggtcgcaagcgaggcgtcctccttcagctcggtggtgcgggcgacaaggcccgccagcagcgccacggtgaagcccgcgatcaggccgccggtcgtcatcgcgaacagattgagccctgacagcaggaagccgatcgcggcgcccggcaggatcgcatgcgccatggcatcgccgaccaggctcatccgccgcagcatcaggaacacgccgatcggcgcaccgccgagcgacagcgcgatcacggccgccagcgcgcggcgcatgaactcgaactcggtgaagggcgtgatcagtgcgtcagtcagcatcggcgtcaggcagcccgtgagcgcggatcggcggcgcaggccgcggcagagtcgtcgaacgcttcgcacatccgcatcgcgaccgtcaggttctccgccgtcagcgcctctgccgtcgggccccattccaccgggcctcgcgccagcaggagcgtttccgggaaattgttgcgcaccatgtcgaggtcgtgcagcgccgccagcacggtgcgaccctcgccgttccagcgcttcaccagatcaagcagatcggcggtggtcttggcgtcgatggcgttgaacggttcgtcgagcacgatcaggcgggcgtcctgcaacagcacgcgcgcgaacagcatgcgctgcatctggccgccggacagcgtgccgatcggccggttctcaaaaccgttgaggccgaccgcggcgagcgccgccaaaatcttgccgcgcgcggccttgccgatgccgccgaagaagccggtcgagcgccacagcccggtgccgacgaaatcgaacaccgagatcgggaaggtgcggtcgatgtcggcggattgcggcaggtaggcgatgtcacggtgctcgagcccgtcgagatcgatcacgcccgacagcggcttgagcacgcccgcgatgccgcgcagcagggtcgacttgccggcgccgttcgggccgatcacggcaagcagcgcgcccgcctcgaccacaccattgagatggtgcaccgccgggtggcggtcatagccgagggtgacgtcgcggaaggtgacaagcgcagccacgggcctcacctcatcgccagccagaccacgccccacaggccggccgagaccgcgaacgcggcgagcagccgggccggcacgggcatccgcaggatcgaccagtgcgcggtctgggccggatgggcggctgggccatggctgtgcccgtggggatgggcatggccgtgatggtggtcgtgggtatgcgtattcgccatagagaagactgttatattataacataacgcgagtccaccgacagggaactcatggccgatccgcaaaaccgggggagacttgagctgcgccggcaccggatctacccggggaacccgccgggccgtgtgcagctcgctcctatcgtcgtcctggcggaaagcaggaagacgatagggatggttctcgatttattgtcgaacatcggcattcaaggcaaacacgcggtgtcatgggaaggggacatagcttcgcatctcgcgacaagatctgtccgagctgtgctcttcgtttcgccgctctggaaacagagggcgcagggaaagccgggtgccgatcgcacccatgggccccgagcaatgggtagaaagctcggg

SEQ ID NO: 24 - DNA, 129975 bp, Bradyrhizobium enterica
aatacttccacgccgcagccgctggatggtccctcagagatctgtgcatgccctagggccttcgccgggacgacagcaccattgggcacaggcgtaccacaccatcaacaaccacggcttggatgtgtggcgcgttagccgcccccactcaaatcgcccgcgcaaacctgcgaaagcccggtgcgccggtcagcgcttcgaaggcggcgtcgcgcttctcttcggcgaaggcgaaacccgccttggtgtagcagcgttcggccgcgtcgttgccgatcaggaacgagatcgacgcccgcgcgaaacctgccgccttgccgtcggcgagcgcgcggccgatcagctcctgcaccagaccacggctgtgttgcgacgcttgcctggcgacatgctcgatcagccagtcaccctcgccgccctgcacccagcagttacgggcatagccgccgcgcgcgacgatggcatcggcatccatgccggtctctgccgcgacttcctcgatcgccgcgcgggctgcgacgaccgtcccggacgcaggcatcgcgcacagcgcggcagcggggacgccatcgacctcagcaatcaggaaatgggcgacgtggtaccatgatctcgcgcgcgcaacggcgagccgcgtcatgaacgccaggcactctccctccggccgatcgagcgcgatgtcgaaccagccgcgcggcaccgggccgcgctgcgcggccagcacgacacgggcgatgaagccggcatcgtcggagcgtgcgggacggatcgaggatcgtcccgcgccgctcatctcaggtgttcttcagcgcgacgcggaattccgcctcggtcttggccttgacctcgtcgagcgtgacgccgtcggcgagctcgatcagcgccatgccatccttgccgtgcttgtcgatggtgaacaccgcgaggtcggtcacgaccatgtcgaccacgcgctcgccggtcagcggcagattgcactgcttgagcagcttggggccgtccttcgcggaatgctccatcacgacgacgacgcgcttgacgccggcgacgaggtccatggcgccacccatgcccttcaccatcttgccggggatcatccagttggcgaggtcgccgttctgcgccacctgcatggcgccgaggatcgacaggtcgatatggccgccgcgcaccatgccgaacgactcggccgaggagaaatagctggtcgagggcagctcgctcacggtctgcttgccggcgttgatgaggtcggcatcgacctcgtcctcgtaagggaacggacccatgccaagcatgccgttctcgctctgcaggttcacgtcgacgccgtcggggatgtagttcgagaccagcgtcgggatgccgatgccgagattgacgtaatagccgtcgcgcagctccttggcggcgcgggcggccatctgttcacgggtccaggccatgaggctctcctgaaaaggtctgatttaggcggcgggccgcggacgggtgttgcggaattcgatccgcttcttgcccgtgccgacctcgatgatgcgtttgacgaagatgccgggcgtgtggatgtggtccgggtcgatctcgccggccggcaccagatgctcgacctcggcgacggtgaccttcgcggcggtcgccatcatcgggttaaagttgcgcgcggtcttgcggtagaccaggttgccggcggtgtcgcccttccaggcatggacgatggcgacgtcggcgaacaggccgcgctccatgatgtacttctcgccgtcgaattccttcacttccttgccttcggcgatcagcgtgccgacgccggtcttggtgtagaaggccggaattccggcgccgccggcgcggatgcgctctgccagcgtgccctgcgggttgaactcgagctccagctcgccggcgagatattgctgggcgaacagcttgttctcgccgacataggacgagatcatcttcttgatctggcgcgtctccagcagtcggctgaggccgatgccgtcgacgccggcattgtttgacacgaccgtcaggcccttgacgccggaatcgcggatcgcgtccgacagggtctcggcgatgccgcaaaggccaaagcctcccgacatgatcatgatgccgtccttgaggagaccatcgagtgccgatttggcgtcgggataaactttgttcatgcagcgaatacctgatggagggcgcggaacggctttggcaaagcggattattaggcgaaatcttcgcaatgcgtcaatcacggccccgtgcggcgacgggcggcagcctgcggcggcaacatggccttgaaagcgtcaagaaaacccttcaagttgcgtgggttggcaggggcctccggcgagcgcccgctgtgttcgacaacgacccgacaaacctcaacccgacccggatatgtcattgacgatggcccaaggaattaagcgcctggggatgccgatcgcggcgcttctcggcctggcgctggtcgggctggtcggaacgtcgtggttcctcaaccgggacgcgctgcagcgcgcggtcgaggcgcagattcgtgccgtgaccgggctcgagctcgtcgtcaacgggccgatcgatgtttcggtgtttccgggcagctacgtctcctttcacaatgtcgggctgaagggcgccgataccgccggtcccgctttgcaggtcgacgtgctgaccgccaatctgcggctgctgccgctgttgctgcggcggttcgaaatcgccgacgtcatgatgctccgcccgcatatccgtgtggtccgcgacgcggccggcgacagcaactggacccccttcgtcgagaccatcgccaaggcgatgacaccaggggccgaaaaccaggtgtcattctcggaaatccggatccaggacggcgagctgaattacgaggacggcaccaacagcatctccgaacagctcggcgatatcgacctgtcgctggcctggccgtcgatctcgcgctcctttgccgcaaccggccagttcgactggcgcggcgagcgcgtcgacggctcgatcagcgccagcgatttcgtcgcgctgctgtcgggcgaccgttccggcctcaaggcccggctggccagcgcgccgctcaaggttgcgttcgacggaaccgtcgccaaccgcaccagcctgatgatggaaggcaccgccaccatggactcaccgtcgctgcgcaacgcgctgcgctggatgggacaggcgccgcccggcggcggtggcggcttcggccgcttcgcgctgaaggcccgcgccaacgtggtcggcggctcggtcgcgctcaccaacgtcaacgtcgagctcgacggcaatgtcgccgagggcgtgatgacctacgccaataacggccggcagacgctgcaggcgacgcttgccgccggcaatctcgatttcacgccctacatctcgaccttccgcctgctcgccagcggtcagcgcgactggaacaggcagctgttcgacctgtcctcgctgtcgtcgaccgatctcgacatgcgcctgtcggcggccaaggtcacggtcggcccgtcgaagctcggccgcaccgcgttcggcgccaatctgcgcggcggcgcgctcgcgctcagcgtcggcgaggcgcagatgtatggcggcatcgccaagggttcgttcgcgatcgcgcgctccgatgcggtcgccgacgtcagggcgcaattccagttcactgatgtcgatttgcaggcctgcgccagcgagctgttcggcatcagcaagctctccggacgcggcaacctcaacgtctcgctgacggcctcgggctccagcccgttcgggctcgcatcgtcgctggacggcaccgccacgctgaacgggcatgacggcgcgatcgcgggcttcaatgtcgagcagctgttgcggcggctggagaagcgcccgctgtccggcggcggcaatttccgctccggctcgacgccctacgacaatctcaacatctcggtgaaattcgccgacggcgttgccaccgccgacgacatccatgtcgagagtcccgcggcgaagatcacgctgaccggcaccgcctcggtgccgtcgcgcgagtacgatctcaagggcgtcgccagcctgacctcggcggcagccggcggcaatgcgttcgatctgcccttcgtgatccagggcccatgggacgatcccttgatcttccccgatccggaaagcctgatccgccgctcgccggcatccgccccgctgctcgacgcggtcaaggatcgcaagacgcgcgatgcggtgcgctccgtgatcgagcgcttcaccggcggagccgcgcggcccgccgccgcgcccgatgcggctgccggcgcgcccggcaacggagcggcgacggcggccgagaacgccaagtcgaactgactggccgaactgagaagccgaactgatcgatccattcactttccgcatggatgcaccgggactgatccttagccttcatcgtgcacccctacagaagtcgtcgatccggcatctttatcgggtcacgggcatgcgctagtgttttctccaaccggttaaaaaaaccggccgcaagagggagaacaacgtgagatccaaggttatcggtgcgctatcgattgcggtcgctgcggtcggcctgtttgccgcaactgcacccgctctggcccagggcaatacgatcaccgtctggtggggcaagggattttacaaatccgaagacgacgcgctgctcgagacgatcaagaaattcgaagccaagaccggcatcaaggtcgaactgtcgcaatacgcgatccaggacatgattccgaagacggtcgccgcgctggattccggcaccgtgcccgacgtcgcctattccgacacctacgacgtgcaggcccagggcaagtgggcctatgagggcaagctcgaggatctctccgacatcatgctgccgatgaaggacgccttcgcgccgaacacgctggaagcggcgctgctctacaacgacgtcgccaagaagaagtcctattacggcttcccgctgaagcagcagagcatgcacgtccagatctggggcgacatgctggagaaagccggcttcaaggccgccgacatcccgaccaagtgggaagattactggacgttctggtgcgacaaggtgcagccggcgatccgcaaggcgaccggccagcgcatctacggcgtcggccagccgatgggcgtggaatccaccgactcgttccagtcgttctacaccttcatggacgcctaccacgtcaagctggtcgacgacgacggcaagctcctggtcgacgatcccaaggtgcgcgacggcttgatccacgcgctgaaggactacaccgacacctacatcaagggctgcacgccgccgtcctcgacgacctggaaggatccggacaacaacgtcgccttccacaacaagacgatcgtgatgacccacaatttcacgatctcgatcgcggcgaagtggttcgaggattccaccaacccggcgctgaccgacgcgcagcgcgccgcaggcaagcaggcctatgagcaggacatcatcacggcgtccttccccaaggcgccggacggctcgaccatcaagtaccgttccgacgtcaagaccgggctgatcttcgccaacgccaagaacaaggccgaaggcaagcagttcatcgccttcctgatgcaggaagacaatgtgcggccctatgtcgagggcgcgctcggccgctggttcccggtaaccaaggcgagccaggcgagcccgttctggcaggccgaccggcaccgcaaggcggtgtggaaccagttcaccggcggcaccacgccgttcgacttcaccaagaactggaagttcaccatcctgaacaacgagaacgtctgggccaaggccatgaaccgcgtcgtcagcgagaaggtgccggtggacaaggccgtcgacgaactgatcgcccgcatcaagcaagtggcgggatgatgcaaacgatgaccagcactgccgatacttgctccgcgtcgtcccggcgaaagccgggacccatacgccgcggcagtcatttgagagcgagttggtcatcggctttcgtgcaacaacgacggccggtggtgatgggtcccggccttcgccgggacgacgtaggcggcatcctgctccaagagtaaccgaatggcgatcacactctccgcatccgatgccccctcgccgccgctgtcggcgcggctgtcgccgccgcaggtctggggcatcgcgctgctcgcgccctatcttctcgtcttcctcgccttcgtggtttatccggtcggctacggcctgtggctggcacggcatccgtcgagctacgtcgcgctgtatcatgacccgatcttcgcccgcgccgcggtcaacacgctgatcttcctggtcatcggcatcaacatcaagatgctgatcgcgctgttcctgtccggcttcttcgcccagcagcggccgtggatcaggtggctgtcggtgatcttcatcctgccctgggcggtgccgtcgatcccgaccattctctcggtacgcttcatgctcaatccggaatggggcgtggtcaaccagctgatcttcaaattcaccggcgacgacggtccaaactggctgaacgatcctgcggtcgcgctggcgatggcgatcggcgtccacatctggaagtcgctgccgttctggacgttgatccttttgaccgggcggctcgccatctcgcacgacctgtatgaggcctccgacgtcgacggcgccaattggtggcagaaattccgctacatcacctggccgtcgatgcagacgctctacatcacctgcacgctgctctcgatgatctggacgctcggcgacttcaacagcgtctatctgctcaccggcggcgggccggccgacctcacccatgtgctgtcgacgctcggcatccgctatctcaggctcgaccagctgtcgctggcgatggcctcgatcgtctgcgccatgccgttcgtgctgccgctggtctattacatgatgaaacggttgtcgcgatgaagctgcccaccctccgcgaagtcggcaccgaggccaagctgctgctgatcggcatcccggtcttcatctggaccatgatcccgatctaccacatgttcgtgttcgcgatctcgccgaaggaggacgcgttcaccggcaagctgtggcctgatcatccgacgctgcataatttctcgatcgtgttccaccagcagcattacttcctgcgcgacttctggatccagttctggaattcgaccgtgatcgcgctcgcggtcggcgcgctgacgctgttcgtcgcgaccgcagccgcgttctcgatctcgcggctgcgggtgccgggcggccgcgccgtgatgaacatggcgctgttcacctacttcatcccggcggcattccttgccgtgccgatgtaccgcaccatgggcacctatggcctcttgaacaatcactggtcgctgatcctggcgatggtgacgatcgccgcgccctacgcgatctgggtgctgaagcaggcctccgacaagctgccggtcgaactggatgaagccgcgacgatggacggcgccaccacgctgcagctgttccgcctggtctatgtgccgctgatgatgccctcgctggtcgcggtcggcacctatgcgatcctgctcgcctggaacgaatatctctacgcgtttctgctgctctcgaaggacaccgacatcacgctgccggtcgcgctcggcaacttcctcgccgccgacgattcgccgtgggagctcttgatgaccaccggcttcatctacgcattgccgccggccgcggtctattacgccttcaagcgctacatggtcggcgggctgacggcaggagcggtcaagtcctgaggcccaagtcgtaatccctcaaagcggcgcggcgctctcgccgcgcgcgctcgacagtttcgaggcgaacgaggcgagtacgatgatcgcggcgatcagcgcgatcaccagcgtgcagatcgcgttgatctcgggcttcacgccgagccgcacttccgagtagatccggatcggcaaggtcgccgagccggggccggtggtgaagctcgcgatcacgacgtcgtcgagcgacagcgtgaaggcgagcatccaccccgccacgatcgcaggcacgatcaacggcagcgtcaccaaaacgaacgcgcgcaccggatcgcagccgaggtccatggcggcctcctccaggctgcggtcgagcgccgagaggcgcgactgcaccacgacggtgacgaagcacatcgtcagcgtggtgtgcgcgatcgtcaccgtccagaagccgcgctcggcattgagcgccacgaacagcagcagcagcgacaggccggagatcacctcgggcatgaccagcggcgaatacagcatgccggagaacagcgcccgcccgcggaaccgctcgccccgcgccagcccgaccgccgccagcgtgcccagcagggtcgccagcgtcgccgagaccgccgcaaccgacaggctcatccacgccgcctccagcatggcgcggtcattgaagaactctcggtaccagcgcagcgaccagccgccccacaccgtcaccagccgcgaggcgttgaacgagtagatcaccaggatgacgatcggcagatagaggaacgccatcccaagcgccagcgaggtcatgttgaagcgtgtcagtctggtcgcagcccgcgccatcagctgccagcctcgagttggcgacgttgcaggcggtcatagagcacgagcggcggcaccagcagcagcaacagcgcgaccgctgcggccgacgccaccggccaatccttgttggtgaagaattcgagccacagcgtctgcccgatcatcagcgagttggagccggcgagcaggtcggggatcacgaactcgccgacgatcggaatgaagcagagcagcgcgccggcaccgacgccgggcagcgacagcgggaacgtcaccagccagaacgcctgccgtggcgaggcgccgagatcgcccgccgcctcgagcagcgaggaatccatcttcgacagcgtcgcatagagcggcaggatcatgaagggcagataggaatagacgatgccgagatacatcgcgctgtcggtcgacagccagaccacccgcgcggaaacaatgtgcagcgcgagcagcacctggttgagcaggccgtcatgctgcaggatgttgatccaggcatagatgcggatcaaaaacgaggtccagaacggcacgattaccagcatcatcgccacaccccgccagcgctgcggcagccgtgccatgccgtaggcaatgggatagccgatcagcagcaggatcaaggtcgaggtcaccgccacgacgaggctgcgcagataggacaggatgtagagattgtcctgcagcagcaggcggaaattgtcgaacgacagctgcgcaaacgcggcagccaatgccgcccggccctcggcgaagtcgaacaccggcgtatagggcggctgcgcgatcgcggtctgcgacaggctgatcttcagcacgaaaccgaacggcaccaggaagaacagcaccatccagagatagggcgcgatcgcggcgagccgtgccgggcgggcgaagatgcggcgcgcgctcattgctccagcaccaggcaatcgtcggcggtgaaccacgccaccacccgctggccggcgaggtaggcgtcgacatcgagccgcgcggtgttggccatcgacgcgcgcagcaccgcgccggtttccagcttgacacggtagctggtcacgccgccgagataattgacgtcggcaacgacgccctccagccggttgatcacatgcgagccgccgtcatccaaggccggcgcacgacgcgacagcttcaccttctcggggcggatcgcgacactgacgacctccttggtcaccggcggccacaactcgctgaccgcgagcgtgcccgcttccgcggtcgaaaccgtcaggcggccgtggtcgcggccggcaacctggccgttgaacagattgatgtcgccgacgaattcggcgatccagcgcgaggccggcgcctcgtagagattgcgcggggtcgcgacctgcaccagccggccggcatccatcacgccgatccggccggccatcgtcatcgcctcctcctggtcgtgggtgacgatgatgaaggtcataccgagccggcgctgcagctccatcagctcgccttgcgtgctctcgcgcagcttcttgtcgagcgcggcgagcggctcgtcgagcagcagcacctgcggccggcgcgccagcgagcgcgccagcgcaacgcgctgccgctgtccgccggagagctgatccggcttgcgcttctcgagcccttcgagcttgaccagcgccaccatctccgcaacgcgggtggcgatatccttgcgcgtcatgccggcgcgcttcaagccgaatgcgatgttgtcgcgcaccgcgagatgcggaaacagcgcgtagttttggaacatcatgttgacggggcgctcgtgcggcagcacctgggcgatgtcgctgccgccgagcaggatgcggccctcatccggcgtctcgaagccggcgagcatgcgcagcagcgtggtcttgccgcagccgctcggcccgagcagcgcgaagaactcgccggcgcggatgtcgagcgagagctggtcgaccgcgcggaaattcccgaacgacttggcgacgccctcgatccgcagcagcggcatgtccgggacggccggttcaggcaacggcctcgccgcctccgcagtcgcttcgcctgctatcacgtccgtcagccccgattccccataaggtccaatcctggcggcaagctagcggcggatcgccaccggctcaaccgcctcacggacatctcccgcaatattgtcggcgtctgcgcctctgcaggggcgggctctcaatgcgttgcgtcggctttgaggcacaaaccggaaggcattgcacagtccgaaccttactgcttgtgaccctgaacggcatcgcgcgccgattgctgcatgcagatcactgaggcagcgccaccccgtcgatttgcatgacgccaagctggtcgaacaactcaatctgctcaccgttcagcactggaatgtagcaacgacgtctagcagacgagatcaagatacagagcttatcctccgcaactgcccatgtcccggttgcaggtccaaaggactcgtcccagtgcggataagtcatcctgccgtcgggctcgaatcgcatagataacggaccattcttgagcttcggaccaaagctgatcgtcttgcccttgaattttgcggccagggtctcacctgtcggtctttcgccgcttgccgcggtgagcgaggcatcgggccccggatcatagcccgaggccttcaagatcagccagaagagcctggccatactccggaaagaaggttcgacgtacggcgcgtcgcggtcgacacgatgcaccacgacgaggtcgagcgcgggcacgattagggcgtattggccaccctggccttgggccaaatagctgcccgcgggcaaaatcaccgtgggcgcaacgtcaccgcccataaaaccgatccaccagagatagccatagcccatcccgagatccgctctcgaatagctgcgcgtgctatcttccacccacgtctgcggcacgacttggtgaccggcccaattgcctttgcgcagatagagtagggcaaagcgcgccaggtcccgtgcactcatgcgggtctcataggcagggtggatggacgcttcgccgcgaacgtagctgccgtcctgtgggcggtagtcttgcatgccgatcggctttgcgatcctctggtcgagtgcctcgaagaggccggtgccggttgcgtgctcgtagatcgtgcctagcgcgttgaagtcccaattgttgtaaaaccagaaggtaccgggcgggtggctgccgcgcggcggtctcctcctggccatgtccggcgtctcatagagcgccgggtggtagaccccggaacgcgcttcgaggagctcgcgcaccgtcgcgcccttctcgatttccgttaaaccaggcggattatcgtcgatgccgagttcgccaagggtgctgttggggttgatcaggtgatccgacacggcgatgccgatcagggcgctgagcacgctcttgcggatggaagcgagctccattggcttcgtcgtattgccccactcggccacgacctttccgtgctgaacgatcacaaccgcgctcgagcgaatctgatccgaaaaggatcgcgcttgggccaattcggtctctgaccagcccaattctgcaggggtgacgcgctcccactccgctgctggaaagccatctccagctgtggcaggcccgaaccgaaccagagtgccgaccagcacgacggcgaaaacgatctggcggatatacattggatcccacgcgctgcgagcttgatctgatcgcagcacaatactcattaacggaagcttggcggaacgcttattgaagtattttcttttggagtcccgccaacgcgttctcataggacgtctcctgttggcccagctcggaccatccagcgatatcagcttttgcgatgctgttgagggccaagcaggcgtaaaccccgaagcggctcgttgcctttatgaggacatgccctaaacttcacggccaaacgcgggaggacaaccgatgatttgcgaccgctacggcctgccgctgacgaccacctcggaccgcgccgccgcgtattatgtcgacggcgtcgatcggatgctggcggcactgcacggcgccgacgcagcgttcgaggcggcgatcgccgaggatcccgactttgcgttggcccatctcggccgtgcccgcgtccaccagctcaacatggagggtgccgcggcccgcgccaaggctgccgacgcccggcagctcgtggcggctgccaccccacgcgagcgccaacacatcgagatcatcgcatccgtgatcgagggccagggcaagatggcgacgacggcggccgaacagcatctcagcgactatccgcgcgatgcgcagatactctcgctgctgctcggcgcgttcggcctctatgctttttccggccggcccgaccatgacgcggcgcggctcgcgatcaccgaacgttacgcgaaggactatggcgacgattggtggttcctcacctatctcggctggtcgaagaccgaggccggcgatgtcgtctcgggccgcgccatcaccgagcgcggctatgcgctaaagccggagaacgccggtgccgcgcacgcgctcgcgcatgcgctgttcgagcagggtgacggcgccgaaggccgcagcttcctctccgcctggctgccggcgaacgaccgcgccagcttcctgcaaggccacctcgcctggcacctcgccttgatcgctatcgaggaaggcgacgccgacagtgcgcttgccatctacgagcagcacatcaagccggcgggccggccctatccgccgctcaatatctataccgacacggcctcgctgctgtggcggctcacggtcgccggcaagaccggcctcgaaccgcattggaaggatgtcgccgcctatggcgacggctatttcccgaaggccggcgcgcatttcgccgacgtgcatcacgcgctggtcgcagccacgaccaacaaggatgcgctcgaggcgcggctctccgagatggcggcgcgcgatgccgacggcaagctggcgcccggccccgccgcgatcgggctcggccggggcgttgcggccttcgcggccggcgaccatgacaaagccgtgcgcatcctggcgccgctgatgcccgaactggtgcggatcggcggcagccacgcgcaacgcgaattgtgggaggacaccttcatcgtcgcatgcctgcgcgccggccagggccggcaggcggcgaggctgatctcgaaccggctacatcgccgtccgtcccggcgcgacctcgcctggtcgcaggaggccgcgaggcaatagccgatcctcaatccggcttcgtcatgaacgcggcgagcgcgtcgcggtcggcttgcggcatggtcaacccgagcttggagcggcgccacagtatatcatcgggaaagcgggcccattccttctgcatgaggtaacgcacctcggcaccggtcagttcagcaccaaaggcgggaccaagatcggccttcgctttggcgtcccccaaaacgtccttcacgttcaacccataggcggccaccagccggcgcgcctgcgcctcgctgaggaagcgccagtggtcgcgcgcgatgtcgacctcggtctcgaaccgttgccaggcgaattcgccgcccggcaatggcgcggtcgcggtccagcgcggcgtcatcggatggaaccgcgtgaacttcgacaccgcccgctcggcacgccaccgcgcggttgtcacgtcgccgccgaacatcgtgagcagcggcgccttgccgcgcccgaaatcgagcgacgcagcgccatcgcttctgtgccggcgcgcgggcgcaataacggaattggcggcggagatcgtccgcagcacatcgaccggggcgatctgctcgcgaaaataacgattggcggcgtcgcagagataggccacttcccgcacgcccatcgcgacaatggcgggatcgcccttgaaggcatgcgtgatgctaccgatcagggtgaagtcgcgctcatagggactggcgaaaatcagctgcccgtcggggttctggaacgcatagacattgtcgcaatcgaacaggcggcgcaccacgatctggctgatctggacggtcgcgagcggcggcgccggcacgcgcagcacggtgtcggcaacggaggcggtccatgcgccggtggcgttgaccagcgatcgcgccgtgatcacccgccgatagccgcgatcgatcgcgaccagccgccaggtctcgccgcgctcggcccgggtcacgcgcgcaccggtgcggatctcggcgccgcgcgccgccgcgtcgacggcggtgagcaccaccagccgggaatcgtcggcgacgcagtcggaatattcgaacgcagttccgaacggccgtttcagcgcatggccgaccggatggtgggtgacgtcgagggttgtcgagcgcggcaggccgctgcgcgaagccagccgctcgtagagcagcagcaacgaccgcaattgccagggcggccgttcctcggcatgcgccgggatcacgaagcgcgccggccgcaccagatgcggcgcgatccgcagcaagacgtcacgttccctcagcgcgcgccggacgcggaagaactcccgccgttccaggccggccaggtcgccgtggaccagccgcggcgaggcctgcgacgcgccggagccgagatcgccctgctccagcaggatcacgcgcaggccgcggccggccgcatcacgagccacgctcgtgccgttcaggccaccgccgatgatcgcgacgtcatagtccgccatgccaacggctatcgcatttcaatgcgaacgaaatacgtgttcgcacaaaaaatgcgtcacggcgcagccccaatcgaagcaaagaactgttccggcccatcgacctcgatcagcttcttgccttcgatcacccagaaccggttggccaccgtccgcacgaactggcggtcgtgcgacaccaggaggcagctggcctgccactccatcagttcctcctccagcgcctcctggccctcgatatcgaggtggttggtcggctcgtcgagcagatagaagttcggctgggtcagccgcagcaccagcatgccgagacgcgccttctgcccgcccgacaaccgcccgatcggacggccctgcatctcgatcgagaggcctgcgccggcgagcaggccgcgggcccgctgatcgccgacctcgaagcgccgcgtcagcatgcgcatcggcgtgtcgccatccctgagatcggccagcccctggtcgcaatagcccagcaccaaggactcggtggcccggatcgccgcgacggccgcctcgggggtcccgatcgcgagccgcagcgccgcgacgaaccgggtcttgccggcgccgttcggcccgagcagcgcgatccggtcgcccctgcagatgaactgctggccggtcctgaacagcggcctgccgtcgggagtggcgacttcagcgttgttcagcctgatcagaaccttggcatgggtgtcgcggttggcgagccggatcgtcccagcggatcgctccatatgcgccggcttcgccgtctcctccaatttctcggcgcgctgcttcaattgcttggtcttcgacaacagaaggtcgctgccggaattgatgccgagattgttgagcttcgcggcctgctgccgaagctgccggaccgccttcatgtcgcgctgatagcgccgctcgtcggaggcatcgaattcgtcgagcgcagcgcgcgccgcggtgtagggcaacgagaacagctgcgaccgctccggacgcaggaacagcgtccggttggtggtcgcatcgagaaaagcgcgatcgtggcttgcgatcaccaccggcatttcacgcggcagcgtgttcagccaactctcgagccggccaatcttggcgaggtcgagatggttggtcggttcgtcgagcagcagcaggtccggctcggtcaccagcgtgcgcgccagcatggcgaagcgcagccagccgccgctcaattgcttgagcggtcttgcccacagttcctcgggcacctcgagcgattgcagggcgacgtcgacccgccagccttcgctgccgcgttgctcggcgagcagcgcgtcgaggacggcggcatggaacgccctgtccagcaggctcagtggcgcatcctgctcgacgtggccgacggtcaggccgcgcgcgcgggtgatgtcgccttcattgggctccatcgcgcctgcgatacagcgcagcagcgtggatttgccccggccgttggcggccacgaggccgatccggtcgccggcattgacggcgaaattcagttcggagaacagcggcgcgttcagcgtcacgccgagattgcgtatgttgatgagggacacggtcaattctctggtcttgccggcgaacacggcatccgggcatccagccatcggatgtgcgtgtcggagcgcggcgaggaattcaaatgcgacacgaactctcaagttcgacgccgcacggccacgaagggcagaccaggaagagattttagtcgagtttccggtcagccctgcaaacgcatctgcagggcgttgacggggccacgcttgaggtggggatcagtgaatctcgccacgacgcagccctcctttctcggcaaaaaagttgtggtgcgccgagatttatccggacgcgcaaccgatggcaagcgcagccggcggggccggcctgacgggtcaggcggatttacccggctttgcgcacggtttcggccaaccggtcgccgccgaccagcgcggcaaattgaccgatcggagccggccggccgatcagatagccctgcaccgcgtcgcagccttcctcggcaaggaaggcgagttgggcctcggtctcgacgccttcggcgacgatcgacatttcaaggccgtggccgagatcgatcaccgcgcgcacgatcgcggccgattgcggattgcggccgagattgatgacgaaggcgcggtcgatcttgatcttgtcgaacggaaacgcctgcagatagctcagcgaggaatagccgctgccgaaatcatccatcgagatgcgcacgccgagcgccttcagccggcgcagcagcgacaggccgcggtcgaaatcctcgatcagcacaccctcggtgatttcgagctcgaggcgatcgggcgtcagcccggtctcgagcaggatcgaatggaccaagccgacgaggtcgccatgggtgaattgcgccggcgacaggttcaccgcgacctgcatcggaaccgtccaggaggccgcctcgcggcaggcttcgcgaaggatccattcgcccatctcgacgatcaggccgctctcctccgcgagcgggatgaagtcactgggcggcacgaagccgcgcaccggatggtgccagcgcgccagcgcctcgaaaccgatgatctggctgcccgcaacgctcgcgccagcgaccgcctgcggctggtagtagagcgacaactcgccgttcttgatcgcgaccgacaattcctgatgcagcacccggcgatcgcggatctgctggtccatctcgggctcgaagatcgagatcgtgccgcgcgacttcgccttggcgcggaacagcgccgcgcccgaattggccagcagcgaggcggcgtcggatccattgtgcgggaacacagcgatgccggtggtgagcccggtgcgcaccgatttgccgtcgatcaggaaatcctgcccgagcgcctcgccggcctgctcggccagcgcgatgccggcgaccggctgccggccgtcgatgatgaggccgaattcgtcgccggacagccgcgcgaccacgccgccgcgtgccacggcctgcaaacgctgcgcgacctcgatcagcaccttgtcgcccatcgcatggccgtagacgtcgttgatctccttcagcccgtcgagatcgacgcagagcacggcgaactcctcgtcggtgccgtcgcaggcctcgatcatctgggtcagcgcctgcaggaaggctgagcggttcggcagatcggtcaggccgtcatgataggccatgtgcgccatccgcgactcggtctggcgccggtcggtgacgtcctcgtgggtcttgatcagatattgcggctcgccgctatcatcgagcacggtcatgcggcgggtcaggaacagccgcaggccgtccttggtcgagatcgggtgctcctcggcgatcatgctgcgcttcctgatcgcggcctcgtcacgggcgacgatcagcttggcttcgcgcgcgttgaagatgtcggacgcggtgaggcccgcggcatcctcgcggcggcggttgaggatcgtttcggcgctgcggttggccaagaggtagcggccgtcgctgacccgctgcacgatcagcgagaccgggatgttgtcgaccacgagctcgaggaatttcttgttgttctcgagctcgcgcgacagcgagcggcggtcggtgacgtcctcgaacagcgcgatcaagaactccggctcgccggcttcgttgcgggcgatcacccggttcgacgccaggatgcgcttctccgcaccgcgttcgacggagaactcgctgcgatgatagccttccggtgcgttcagcgccgcgcggtcggccgtgtcgatgctgacggcggtctcggggcggaagatctcgtcggcgcgcttgcccacgatgtgatcgcgcgagaagcgcgagaagcgctcgaacgcgcggttggcgaagatgtagcggccgtcctcgatgttcttggccgcgacgcagaccggcacgttgtcgagcacggattcgaggaactgggtggtcgaggcgagcttgcgcgacagcttgcgctggtcggtgcagtcgagatgggtcgcgaccgagccgccgttcggcagcggaaaatatcgcaccagcaccgatcggccgccgggcagctcggtgaccatcccctcgggcgtcgcggcccgcgcaaagaaatcctcggcgctgacgtcgagcacgccgcggtcgcggcgcagctccagcagttcggtgccggtcatgtggcgccggatgtcggcccgcgacaggccgtagatatcgagatagcggtcgttgcagaacacgatccgctctcgcgcatcggtcatcaccacgccctggttcagatggttgagggccgacgagacaaaggcgttgcgccgcaattgcgcgcgcttggccttgcgcagggcggagagcacccagagcccgatcgcaccgaggaacgaggcaaccaccacgctgccgatcaggagctcccagaccacgccgggatcgaggtcaccgagataggtcgagggcgcaaaggcggcggaggcggcccgggctgcaccgaacggcacgacggcggcgaccaggcaaaggacggcccttgccggaatccaattcttcccgcccgcctgccacttcctgccagccatcgatcacccgcggatttccggggcgagtgtccggttccggcggtttggatcgggtaaacgcgtagggctgcaaccgggaaatgccgcttaatatacggcaattgccctgacatgattaatgctccactaacagggcatggctccccaactaattgagatggcgcaaacacttgccgaatgcgatcggatcggcagaacgatgttggcggcaacggccagggcatggctgcgcggaaatattcggacctgaaggacaagatggacagggttgattgcgtgatcgtcggtgcgggggtgatcggcctcgcggtggcgcgccggctggcacaggccggccgcgaagtgattgtgatcgaggaggccgaagcgatcggcacggtgacctcgtcgcgcaacagcgaggtgatccacgccggcatctactacaaggccggcagcctgatggcgcggatgtgcgtcagcggcaagcgggcgctgtaccgctactgcgccgagcacggcatcccgcacaagaattgcggcaagctgatcgtcgccacaacagcggcggagaccgagaaattgcaatcgatccgggctcatgccgcggccaacggggtcgacgacatgcagctgttgtccggcgcggcggcgcgtgagctggagccggcgctgaattgcgacgcggcgctgctgtcgccctcgaccgggattatcgacagccatgcttacatgctggcgctgcgcggcgacgccgaggcggccggggcggcgttcgccttccataccccgctgctgcacgcgcgggcgacggccaacgggttcgaggtcgaagccggcggcgcagcgccgatgacgctcgcctgcgatctcctggtcaatgccgccggcctcggcgcgacggcgatcgcgcgcaatgtcgagggcatgccgatcgatttgattccaacggcttatctggccaagggcaattatttcagttgcagcgccagggcgccgttctcgcacctgatctatccggtgccggagcccggcgggctcggcgtgcacctgacgctcgacatggccggacaggcacggttcggccccgacgtcgagtggatcgatcgcatcgattatgcggtcgacccggctcgcgccgagcggttctatccggcgatccgaaaatactggccgaccctgccggatggcgcgctgatgccgagctattcgggaatccggcccaagatcgtgccgccggcggtggcgacccaggatttcctgatccaggggccgaccgatcacggcgtcgccggcctgatcaacctgtttgggattgaatcgcccgggctgacgtcgtcgctcgcggtcgccgaccacgtcggcgagctggcagggctctgagcaaatgcagcaaaccctcccgagggagacgcgcttccgcgctcatccctcggtgaaaggccagattattcgctagtttgcggggacggtgacttagtggaccgtgtcgtcggtggagagtctcaaccgttcgatctggtccttgaccatgagcttgcggcgcttcagctcgcaaatgtgcaggtcgtctacggaggggtgaacgagcgcttcgtgcagttcgttctcgagtattttgtgcttacgctccagctcaacgagatgggcctgtattgccattgcgaacactcctcggtgcgttaaacctcaggttcgatccggactcctgagtgtacacaagtgggcggcgctgtcgatgggggacgcgaaatgccgcacgcacgcatttcggtttatctgtaaccaatcgtgactatggaaccggtccggcttgcgcagcgcgcccgcagggaggatattccggcgagcggctgcttcggccgcaacaacctcgtcgtgcttaccagtcaatacgcaaccatgaacgatcaggatgagcgcgaactcctctccgagcttgcgcgtctgcaacaagagcaccgcgacctcgatgccgcgatcgacgcgctgcatcagtcgccagcgccggatctcctgatgctgcagcgcttgaagaagcggaagctgcaattgcgcgaccgcatcgccttcatcgaagaccagatcacgcccgacatcatcgcctgaggcgcgccagccgggttcggcggcccgccggttcaggtcggtcgggggttttccccgtcatccacagcacccggccggcttcacgttcgcggcaacggacgcgggcgcggttttcggcgcttgactccaaaagaacaaaataagaacatactgacgcagcctccagccagccatcagagggagtttcgccatgtccgcaccgccttccctgcccgagcacacccactacgagaaggcctgcgaccaggcgatcgcgatgtgcgacggcaacctgcgcagcaccatcaaggcgctgatcatggccaacgaatatctggaagccgagctcgaggaattgcaggccgcgatcacggccggctgcgtgccggcgcgaacccagttggcgagcgacgcggcaagcgacgccgcctgatctccgggagtacggcaatggctgacgtgacctattacgtggcactgcccttcatgcaggacgaggacggcacgccggtcgccggcagcggcgaggaatgccagagttcggcgatcgccatgcgccgggcggaaacgatgtcgcggatgcccggcagcatcggcgccgtcgcgttcagccgcaccggcgatcccgcgatcggcgaattcggcgatgccaagctgctgcgcgcctacggcaacgtgcctgaagatctcagcgcgctgtaaccgctggggatgacggcctcgagagttcacctctcccttgggagaggtcgaggtgaaccgagaccgcgccaggccgattcaaccaaaactcatcctgctctgggattctcttaggactcatggcgccgctgcgccttgcggacatacatcgcacggtcggcctcatcgagaacgcggtcgacatcggaatgcgcggtgatgatcgcaacgcctgcggaggcgcccgcggagacgcggctgccacggaacacgaagctcaggcgatcgatcgcgtcttccagcgcagccgccttggcacgcgcgtcagtctcactgagattccacagcagcaccgcgaactcgtcgccgccgaggcggccgatcacgtcggaggcacgtatctggtccgatatcgcggcaacgatcgtcttcagcacctcgtcgccggccgcgtgcccgaaggcatcgttgatcggcttgaggcggtcgacgtcgagcacgatcagcgcgccggacgcctgatagcgcttgatgaaggagagcgaccgggcgagctcgcgctcgaagccgcgacgattgaagatgtcgagcaggaagtcggtctcggccgaggtctgcagctcctcgatccgggcctgggcccgcgccagctgcgtccgcaacctgcggatggtggatttatcgctggaggccaccgcgcctcgcgtggaggcttcggttccagccgccttggttccagtcgccttggttccagttctgcccggccccgggttgcgcgcggcgggcgcgctttttcgtcgctttgcggcccctgaggcggccgccgtggtctttttcttcatgcgcatccttgttgaggcctgcttatgaaggcttgccgggattcaccaagacaggatagtccattctgactcccttgccacgccttggatgagaaccgggccgtccctataatcggcctatgcttttggattcctgcacagaattgaagagatgaccgctccgatcgccatcatcatgggaagccagtccgactgggaaaccatgcgccatgccgccgagaccctggccgcgctgggtgttgcctgcgaaacgcgcatcgtttcggcgcaccgcaccccggatcggctctttgcctttgccaagggcgccaaggcggccggtcacaaggtgatcattgccggcgccggcggcgccgcccacctgccgggcatgacggccgcgctgacggagcttccggtgttcggggttcccgtggagtcgaaagcgctgtccggcgtcgattcgctgtactcgatcgtgcagatgccggccggcatcccggtcgggacgctggcaatcggcaaggcgggtgcgatcaatgccgcgctgctcgcggcgagcgtgctcgcgctcaatgatcctgcactcgcggcccgccttgcagtatggcgcaaggcgcagaccgatgcggtcaaggaacacccggaggcctcggcgtgacggcttcgaaccctgtgaagctgaagccgggcgacaccatcggaatcctcggcggcggacaattgggccgcatgctggcgatggccgcagcgcgcctcgggctgcgctgccaggtgttctcgccggatccggactcgccggccttcgacgtggtgcagcacgccacctgcgcggaatatgccgacgtcgaggcgctcgagctgttcgccaacgacgtcgacgtcgtcacctatgaattcgagaacgtgccggccgcgaccgcaatggtgcttgccgcgcgccgcccggtgctgccggcatacaagatcctcgagaccacgcaggaccgccttatcgagaaggatttcgtcagcaagctcggcattggcaccgccgattatgccgacgtctcctctgtcgccacgctgcgcgccgcgatcgagcggatcggcctgccggccgtgatcaagacccgccgcttcggctatgatggcaagggccaggccatcatccgcgccggcgacgacatcgaacaggtctgggacgacctcggcaccaagtcggccattctcgaagccttcgtgccgttcgagcgcgagatctcggtgatcgcggcccgctccgcgtccggcgaggtcgagtgcttcgacgtcaccgagaacgagcatcgcgatcacattctgaaattttcacgggtgccggccgcgatccccgaggagcttgccgcgcaggcgcgcgcgatcgccgaaaagatcgcatccgcactcgactatgtcggcgtgcttgcggtggaattgttcgtggtgcccggcaatggcagcaaagcgacggtgctggtcaacgagatcgcgccgcgcgtgcacaattccggccactggacgctcgacggcgcctcgatttcacaattcgagcagcacatccgcgcgatcgcgggctggccgctcggcaagccggtgcgccatggggaggtcaccatgaccaacctgatcggcgacgacattctgagctacgagcagtggctcaccgttcccggcgcgaccgtgcatctgtacggcaaaggcacgccgcgcccgggacgcaagatgggccacgtcaccgaagtgacgccgccgcgcaagtcatagccgattgagacctgctggtgtcccgaatcccacgttcgcatcatttaagttgaactggtttgaccacggctgcggttcacctctccccgacggggagaggtcgatttgcgcagcaaatcgggtgaggggccgcagctctaacgagagaccgtaatccctcacccggcgctacgcgccgacctctcccaagggagaggtggactcggctgccgctctacaccaacctaatcgcatcacgctctgcacgaaaatgggatcgtgaggctcacgatcccattcgccaatcacatcacgcagtcttgacgccggcgacgacgccggtcggctcgtcgctgagccagcgatagatcacgccgccgagcgcaccgccgatcaaaggcgcgacccagaacagccagagctgccccagcgcccagccgccgacgaacaatgccggaccggtgctgcgcgccgggttcaccgaggtgttggtgacgggaatgctgacgagatggatcatcaccagcgcgaggccgatggcgagcggcgcgaagccggcaggcgccttgccgtgggtcgatcccatgatgatgaacaggaacatcatggtcatcacgacctccatgatgaagcagaccaccatgctgtactggccgggtgaatgcgcgtcatagccgttggaggcgaagcccttgctgacatcgaagccgggcgcaccgctggcgatcacatagagcagccaggccgcgacgatcgcgccgatgacctgcgcgatgatgtagggcagcacctggccgccggggaaacgcccgcctgcggcgagcccgaccgtcaccgccggattgaggtggcaaccggagatgtggccgatcgcgtacgccatggtcaccacgctcaacccgaaggccaatgacacgccgaccaggccgatcccgacctgcggaaagccggccgcaatgacagcgctgccgcagccagcgaatgtgagccagaacgtaccgatcagctcggccgcgtatttcttcatatccatgtggcatctcccctatttccaatgtccgggttatccaaaactccgggaacggcctcgatcctggcgccaaaccacccaaatcagggccgcacaaaggcattttcgccccatttcgtggctttactaggcccgaaagtcactcgaccggtggacatctgcgcgtttgtctgatacatgcgcgcgcctagggttaagaagcaggccttttgccgcccctttaccccgccagaattccgaaccgatcaattcaaaagaggatgccgcgtgcaggttctcgtccgcgataacaatgtcgaccaagccctgaaggcgctgaagaagaagatgcagcgcgagggcattttccgcgagatgaagctccgcggtcactacgaaaagccctctgagaagaaggcccgcgaaaaggccgaagccgtgcgccgcgctcgcaagctggcgcgcaagaagctgcagcgcgaaggcctgctgccaatgaagccgaagccggtgttcggcgctggtcccggtggcgaccgcggcggccgtcccggtggcgctggcgctggccgcggcccccgctgaaccgttttgccgatctggaagtctaacagcgcgggccatgggcccgcgttgtcgttttgatgcaaagccgcgttccggggcacccatgcaagattaccggcaagagcattttgcatgacggatgctcgggcaccccgcactggctttcccgcaccattcgaccgcagtcgcgcggcgcaatccatcatcatcgcaatggttctcggcctgccgctcgggggctgctctttcgacctcggctcatggggcttggacgacaagccgaaaccggctgctgccgccgccggcaagccggctgccgacaccatcacgccacaggacatcagcagcgccagggatcacgtcacgcgcggccaggtgctggcgcgttccggcaagatcgacgaggcgcaggcggagttcgagcaagcgctgaccgccgacccctacaacatccaggcgctgtacggccgtggcctgatctaccagggccgcggacagcatcagcaggcgatcgacgatttcacggcggccagcgggctgtcgccgcagagggccgaacccctggtcggccgcgccaccagttaccttgcgctcgacaaggccaagcaggccgccaccgacctcgatgaggcggtgcaggccgatcccaacaatgttgcggcgtggagcgcccgcggccaagcctatgagcggctcggcgacaaggccaaggcggcagcgtcctacaaccgcgcgctggcgctacggcccggcgacggcaacgcgcgcagcgggctggtgcgcacgggcggataaggcctgatgagattcggttgagctgtaacggcgtcgaaagttcacctctcccttgggagaggtcgatttgcgcagcaaatcgggtgaggggtgacggtcgatcgagagagcaagagccctcacccggattgcactggacgatgcttcgcatcaccaggcgcaatccgacctctccccggcggggagaggtgaaccaagaccgcgcaaagccgattcaatcaaactcgctttagtctcaggctgctttcggcaggacgcttacttcggcaggacggcgtggaacatcgacctcatgccggagaacatgtcgtcggtcaccgagctgtgctcattcttcggcgcagccatcgtcgcgtcggcccgcaggtcgagcggcgcctggatcaccgggaccggaatgtcggccggcggggtcagccggttcgaatcctgcgcgctggcggcgtagggcggacgcggctgcgaggattgatcggcattgtcgctggacgggttcgacaccatgatcggcggcggcaacggccggatcgccgacgaagcagtggggcgctgcgcgtcaggcagacgggcaagatcggtgcgcggcgcatcctgggagcgcgcggcgtcctgggagcgcgccgcttcctgcgggcgttccttgcgcagccgctcgatggcagcgcgcgccagatcgttggcgtcgcggttttcctccggcgtggcggcggcctcgaccggtgcagccgtggtagcaggcgcggccggctgcggcgcggcgggcgtcacctttgcgaccgccttcggcgcagccggatgatgacgggcgtcggcgggaatgctggcggtatcagccggcgcgtcaggcttctggtcggcggatttctcggtgacggtcgccttctcggacgccgaccgctcgatcagcgtgcgctcggacatgcccttggccttcacaccggcttcgggaaggctgctgaccacggtggcgggcttggcggcggctttcggatcgacggccgtggtcacggctgcggcggcgggcgcctccggcttggacacgatgtagtgattgacgatgtacgccccgatgatggtcgctgccaccgagggtaagatgtccatcacgaatttcttcaggtaactcagcatgacctgccactccccaccccgttatttcatgctggaactttgaggcacattcagggatcaactgcgacggatcggtggcaaacccccgttccgacgtcacctttggtgtcactttggtttcagcggaggcgccccctgcgtaggccgcatccacctctcaattcatcgtgcagccgttaacgggttatgaatttccacagccgcgccggctcggacctgccattcggcgcgcgcagggttaagcacggcgtcagggcttgagttcaacctccaggaacacgatctcgctggccgtctcgttcagcacgtcgtgctgaaccccggccttgcggaagtaggacttgccggccccaagctgcgccttcgagcgctcgccattcggcgccacgatggtcatctccccggccgtgatcggtacgatgacgtagtccatctcatgggtgtggtggccggtggcgctgcccggcgcgagccgccattcggtgacgcgaacctccgccgtatccacctgcacctccgatttggcgctgagcatcgtcattttctccgagtttcttgcttgagcgaatcatgccctacggcacgaaaaccatgaacacgaacaccgcgaacaccaccatgtgaacgagcccgaacaggatgttggtgcggccggttccgaaggtcagcatgctgaccatgaaggtcagcagcaggatcagcatatgctggttgctgagcccgagcaccagctgcttgtcgagcacataggcggcgagggccaccgcgggaaccgtgagcccgatcgtcgcgatcgaggagccgagcgcgaggttgatgctcttctgcaggtcgttcttgcgcgccgccgccacggcggcgacgctctccggcagcaggatcagggccgccaccaccaggccggcaaaggccggcggcgcaccgatcttgacggtgacgacatcgaccaccagcgagaatttcttggccagcagcaccaccgccagcagcgacaccagcagcaggacgacgctgatcgcggtctcacggtccgacatcacctcgccatgcgccgccgcctcgttggcgccgctgacgaagtaatcgcggtggcggatggtctgggtgtagaggaacaccgcatagagcagcagggtcacgacgctgatcacggcgagctgggccgtggaatagatcgggccgggcgcggtcagcgtgaaattcggcatgtccagcgtgatggtcgcgagcacgaacagcacgctgaggtaaagattcgcgccggtgatctggaaatcctgctcgcggtagcggatgccgccgatgaagatgcagagcccgaccaggccgttgcagacgatcatcaccaccgcaaacacggtgtcgcgcgccagcgtcggggccggcgtatcgccgagcatgatggtcgagatcagcgccacctcgatgatggtcacggccagcgtcaggagcagcgtgccgaacggctcgccgatccgctcggcgatcatctcggcgtgatgcacggccgcgaacacggtgccgaacaggatcaccagcagcacggccgcgaacacccagccggccgccgacggcgcgaaactgtagccggtggccgagaccgcggcaaacaacagcaccgccagaacgggatacagccaggccgaccgtggcatcggtccgtgtgcgctcatatcgtcagacctctcaattcgactgccgcgattatgcgatagacaagcgccgccgtcagcctcttgcggcgtcgatgaacggcctcaccgtccccatcgcaccgaattcgtcgagattgtcgtgcccgccgccgggcagccgcacgaactgcttgggctcgtgagcgaggccgaacaggcgctcgccgaaacggatcgggatcgccgggtcgtcggtgccatgcatgatcaggagcggcaccgtgaccccagtgattcgctggtctgaatggaattgatcccgcatcagcaggctgaccggcacaaaccagaaaatcgcgccggcgacgtcggccgtcgacgtgtagggcgcttccaggatcagccggccgaccggatgctcggcggcaagcgcgaccgcaacgccggtgccgagcgagaatccccaggccacgatctcagcgggacggtagcgcgcagtggtgaacgcgtaggctgccgcagcgtcacgcagcaggccctgctcgctcggagatccgctcgagccggcatagccgcgataggacagcgccaccagcccggtgccgtcggcggtgatcgccttgaagcgcgcgacccgcccggcaaggaaatcgccattgccaggaaagaagagcacgacgggccggccgggcttcgccgccacgtgccagacgatgaccttctcgccgtcatccgtggtcaggacatgctcttcggcctcgggaaggccggcggccgcgggcgccgtccgtcccaccggcggaatcggaaacagcatctcgcgctgcttgacgtacagcaccgcaaggcccccgagatagacgaccgcggcgacgatcagcagccatttcatgatcgtcagcaccacgcgcaaatcccgcctgccgctctagatttggtgtgtcggatgatgcgagcccccatcgctactttgcatggggttgttttcgcggtttttcgtcccgcccctgattcttggtggtcggcgagacaggcctgcgcctggaaacgagcagcttttcgacctcgagcctgacgctgtccggaacgggccggcacgcgcaaacattcgcatgcgccacatgccacctgatgcgctgctcgcgcgtcgcccggggcggcatgcgatggtctcgatgccactcccggttcagtgccactcgccgcccgcctacatcgccttgacgatgttctcggtgaccttcttggcgtcgccgagcagcatcatggtgttgtcgcggtagaacagcggattgtcgatgccggcatagcctgacgccagcgagcgcttgatgaacatcacggtgccggccttccagacctgcagcaccggcatgccgtagatcggcgaggtcttgtcctcctccgccgccgggttggtgacgtcgttggcgccgatcacgaaggcgatgtcggcctgggcgaactccgagttgatgtcctcgagctcgaacacctcgtcatagggcacgttggcttcggcgagcagcacgttcatgtggccgggcatgcggcccgccaccgggtggatggcgtatttcacctcgacgccttccttcttcaggaggtcggccatctcgcgcagcgcgtgctgggcctgcgccaccgccatgccgtagcccggtacgatgatgaccttggaggcgttcttcatgatgaaggcggcatcgtcagccgagccgagcttggcgggcttctgctcgcccgagccgccgccggccgccgcggtctcaccgccgaagccgccgaggatcaccgaaatgaacgagcggttcatcgcgtggcacatgatgtaggacaggatcgcgcccgacgagccgaccagcgcgccggtgatgatcagcgccgaattgccgagcgtgaagccgatgccggccgcggcccagccggaataggagttcagcatcgagatcacgaccggcatgtcggcgccgccgatcgggatgatcatcaagacgccgagcgccagcgccaggatcgtgatcatccagaagtcgaacgcgctgcccgaaagcacgaggccgacgatgaagaacaccagcgccagcgccagcacgatgttgatgacgtggcggaacggcaggatgatcggcgcgccgctcatccgcgccgacagcttcaggaacgcgatcaccgagccggtgaaggtcagcgcgccgatcgcgacgccgagcgacatctcgaccaggctctgcggatggatgttgccgggcgtaccgatatcgaaggcctcgggcgcgtagaacgcgccggcggcgaccagcaccgcggccatgccgaccagcgagtggaacgcggcgaccagctcgggcatcgaggtcatcggcacccggcgtgcgatcacggcgccgatgccgccgccgatcgcgaccgcgacaatcaccagcagccaggccacgccgtcggccggcggatggctcgccagcgtggtggcgaccgcgatcgccatgccgatcatgccgaacatgttgccctggcgcgacgacgccgggctcgacaggccgcgcagcgacaggatgaacagcacccccgccacgaggtacaacagtgcagagagattggcgctcatctcaggtccccccaaattcttaactcaccccgaggtggttgccgttacttggctttcttcttgtacatcgccagcatgcgctgggtgaccaggaagccgccgaagatgttcacgcaggcgaagatcagcgcgacgaagccgaagccgcgggcccagcccgagccgctcgacaccatgccgacgccgaccgcgagcagcgcaccgaccacgatcaccgaggagatcgcgttggtcacgctcatcagcggcgtgtgcagcgcgggggtcaccgaccacaccacgaaatagccgacgaacacggcgaggacgaaaatcgacagccggaacacgaagggatcaacggcctgcgcgagatgctccatggcttctctccttacttcggctggaagttgggatggatgacggcgccgtccttggtcagcgcggtggccttcaccagttcgtcgtcccaattgaccgcgagtgccttgttggccttgtcgaccatcgtctcgatgaacgagaacaggttgcgcgcatagaggctggaggccgaagcggcgacgcggccggcgacattggtgtagccgacgatcttgacgccgtcggtctcgacgacctcgccgggcctggcgccctcgacattgccgccgcgctcgacggcgagatcgaccagcaccgagccgggcttcatcgacttcaccatctcgccggagacgagtttcggcgccggacggcccggaatcagcgcggtcgtgatcacgatgtcctgcttcttgatgtgctcggcggtcagcgcggcctgcttggcctggtactccttggacatctccttggcgtagccgccggcggtctgcgcgttcttgaactcctcgtcctcgaccgcgaggaatttcgcaccgagggattccacctgctccttggtggcgggccgcacgtcggtcgcggtgacgacggcacccagccgccgcgcggtcgcgatcgcctgcaggccggcgacgccgacgcccatcacgaacaccttggccgccggaacggtgccggcggcggtcatcatcatcgggaaggcgcggccgaacgcttcggcgccctcgatcacggcgcggtagccggccagattggcctgcgacgacagcacgtccatcacctgggcgcgggtgatgcgcggcatcaattccatcgcaaacgccgacacgccggcatcggccatcgtcttcagcgcggcctcgttgccgtaggggtccatgatcgcgatgaccagcgcaccgcgcttgtatttggagagttcggaggcctcgggccgcttcactttgatgatgatgtcggcatccttgagcgcatcggcgctgacggtggcgcccgccgcggtgagctccgaatcaggcaggcccgacttgacacccgcgcccggctcgaccgcgacctcggcaccgagcgccttgaacttcttgatggtgtccggcgaaaccgcaacccgcggctcggacggatcgatttccttggcaacggcgatcttcatgggccctccggcggcgcgagcggcgcacgcgtcttaaaactagcgttattttcgccagattggataccccggtttttacagccgggttgaacaggaatgccggcaccgccgcgggacggcgatgccgctagccgaccgtaaggatcagaccaggaaataggccatcagagcgaggaggatggcgacgctgatcgtgccccatttgaccagcatgagaaacccttcataggtctgctcatgtgccacgtagtcattgccgtcggcggtcgtataggccacttcgctatggtctgccattgctgtccccagtcagaaattcgcgttctgcgagccattaccgcaaacggattggcagggcaacggcgcgctccctatcgggtgatttggagcgcaaatcgtccccgattcaccccttaagtgccggccttgcggccgccgctcgggcaggatcgatctgccgaacgcaggtgtcatgggatggtcatgccgcgaggcgcaaaaagcgccgaacgaatctgatccggacgggccggaaggctgatgggcctcagcccatcgcctccagctcgtcgatcatgccggcgatcacggacaggccgccgtcccagaatttcgggtccttggcgtcgaggccgaacggccgcagcagttcggagtaatgcttggtgccgccggcggcgagcatgtcgagatagcgctcggcgaaaccctcggacgcatgctcgtagaccgcatagagcgagttcaccaggcagtcgccgaacgcgtaggcgtagacgtagaacggcgagtggatgaaatgcgggatgtacatccagaacgtctcgtagcccggcttgatctcgatcgcaggcccgaggctctcgccctgcacgctgagccagagctggccgatccgctcggcggtgagctcaccgttcttgcgctcggtgtgaaccgcgcgctcgaatgaatagaacgcgatctgccgcaccacggtgttgatcatgtcctcgaccttgcccgcgagcagcgcctggcgctgcttggcgttcctggtctgggagagcagccgcttgaaggtcagcatctcgccgaacacgctcgcggtttccgccagcgtcaacggcgtcggcgccatcagcgcgccgttcttcgccgccagcacctgatgcacgccatgaccgagctcatgcgccagcgtcatcacgtcacgcggcttgccctggtaattcatcagcacgtaaggatgcgccgacggcgtggtcggatgcgagaacgcgcccggcgccttgccgggacggaccggcgcatcgatccagcgatcgtcgaagaagcgctccgcgatctcggccatcctcggcgagaaaccgttataggccgacagcaccatgttgcgcgcctcgggccaggcgatggtgccggtcgccgcgaacggcagcggcgcgttgcggtcccaatgcgggagcttcttcttcttgaaccagccggccttcaacgcgtagtagcgatgcgacagcttcggataggccgcgcgcaccgaggcgaccagcgcatcgaccacttcgcgctcgacgcggttgttgagatggcgggagtcggcgacgtcctggaagccgcgccagcggtcggagatttccttgtccttggcgagcgtgttggtgatcagcgcgaaagtgcgctcattgtccttgaaggtcttggcgagcgcctgtgccgccgccttgcgcttgtcgccggccttgtcctgcaacaggttcagcgtcggctcgatggcaagctccttgcccgagaccttgaagcgcaggccggagatggtctggtcgaacagccggttccaggcggcatagccgctttgcgccttttcgtggaacagctgctcgacgcgatcctcgagctggtacggcttgtccttgcgcagatcctcgatccacggccggtaatggccgagcgccggttcggccatcgcgcgctcgatcacgtcatcgtcgacgcgattgagctcgagcgagaagaacaagagatgcaccgacgccgccgtcaaccgttcggagacatcgccatagaatttcgagatcgccgggtcgacgctgtcgccggcatggaccaggccggcataggagccgagacgaccggccaggtcgtcgatcgcctcgtaacgcctgaccgcctcggcgagccactttccgccgccttcgcgagcggtattttcagcaagcttacccttgtagtcggtctcaaacgcgacgcaatctgcatccattttctgcaggtcgcgcccgacttccggcgcgtcgataccggagtagagatccgccagattccattccggaagcttgccggtcttgccggcggccgtttttgccgccggtccgcctgcggagggtttgcgttgggcgccggtcttgcgcatggcggcttccttgcggagagcggccttgctgggagcagacttgttcggggcagttttggagcgcgaggtcatcttgttcgaaaccttagttcaatcggaaagatgtcggcggcggcggaataagggcgggtttgcaacgtttaagagtgcgttaatcggcatcggcgacattgccccgattcgagacaaataatcgtagcgtgcggggaaaaccatggctgccaccattttgatcgccgatgacgacgcagtacagcgtcgtttggttgaaaacatggtgcagaagtgcggctatgagcccctcgtcgtcgacagtggcgatgcggcgattgcggccctgaccgcatccgagacgcaggcgatcgatgccgtcgtgctcgacctcgtgatgccgggcctcgacggcctcggagtcctcgcaaagattcgtgaagctggtttgaacgtcccggtcatcgtgcagaccgcgcatggcggcatcgacaatgtggtgtcggcgatgcgcgccggtgcccaggacttcgtcgtcaagccggtcggcttcgagcggttgcaggtctccctgcgcaacgccctcaacgcgtcggcgctgaaaggcgaattgcagcgcatccgccacagccgcgagggccggctgaccttctccgacatcatcacccgcagcgaggcgatggccggggtgctgcgcacggcgcagaaagccgcatcctcgacgattcccgtgctgatcgagggcgaatccggcgtcggcaaggaactgttcgcgcgcgccatccacggcagcagcgagcgcaaggccaagccgttcgtcgcggtgaactgcggcgcgattccggacaatctcgtcgaatcgatcctgttcggccatgagaagggcgccttcaccggcgccaccgaacgccaccagggcaagttcgtcgaggctcatggcggcaccctgttcctcgacgaggtcggcgaattgccgctggcgacgcaggtcaagctgctgcgcgcgctgcaggaaggtaccgtcgaggcggtgggcggacgcaagccggtcaaggtcgacgtccgcatcatctcggcgaccaaccgcaagctgctcgacctcgtgaaggccggcgagttccgcgaggacctgttctaccgcctgcacgtgctgccgctgaccattccggcgctgcggcagcggcgcgaggacatcccgcatctgctgcggcatttcctggcgcggttctgcgccgaggagaaccgcaacatcaccggcatcagcggtgatgcgatggcgcatctggcgcagctcgattggcccggcaacatccgtcagctcgagaacacggtgtatcgcgccgttgtcatgagcgacggcgaccagctcgggctcgccgacttcccgcaaagctcggcgcatccggcgccggaaggaaagtcctttcagggcgagccgctggtggtgtcgccctccaccgcgcccgccatgattcccggtaatgaaataccgacgtcgactgccctccccactgccggcggcctctcgatgctcactgctgcgggcgaggtgcgcccgctagaagatctcgagaacgagatcatccgctttgcgatttcgcattatcgcggccagatgtcggaggtcgcgcgccgcctcaagatcggccgctcgaccctctaccgcaagctcgacgaagccgcggccggcgcgcgcagcaacgacgccggctaagccccgaggccgatgaggcgataccagggaaccttttgaaccgtgtccctccggtgacagacaaaggctgtgccgcgtggcaaaaacgcacagcccgagcgaaatcagccgcttcgaggtcagtttgtcgtgagttgccccgcatggcgctggctgcacaagaggggcaaatgtatcgtctgcgtttgttgcgtgcaggcatacgagtcgatcaagaggccggcgctttcgcgcaagctatgaaaccaatactgatttgaactgttccagaatctgggagcagttccacccagggggtgcgaaaatgcgtgactgttcgaacaaccgtcgaggatttgaccgcgtcttgatggccgtcgcggcaaccttcctcacggtgtccgcgaccacggctttcgcacaagacacgccccgctcgagcgcctcggaacttgcgatcgacgccgcgatcccgcgccccgaaccggccaacgtcccgccgcccaccgcgagcgatttcaaggccgacaccaccgccgcgctgcccgacgcggccaagccggccgacgcgaagcccaccgatgtgcaggccaccgaagccaaaccggttgacgcaaagccggcggagccgagcgcgaccgcaaaggccgtggagcccgctgacgcgccgaaggccgatgcaccgaagaccgacaccgctgttgcgccgcctgcagcggcacccgcgcctgccaccgcaacggcgcccgccgcagctccggctcccgcgacggccgcggcccctgcgattgaaccggcgaaggccgcgagcaatgttgccgtcgaggatcaaccggtcgccggcaaggtgcgcgaactgctcgccagcaagactctgcgcaccttcgatcgcaagaacgagcgcgcggccgcagagaaattctattcggcccgcgactatgcgcctgtcttcactaaggccggccagctgaccgacgccggcaagggcgtcatcgcccgcctgaaagacgcggctgccgacggcctcgatgcagcagattatccggtgccggatttcgccgcagcgtcgacccccgatgcgctggccgacgccgagctgaagctcgcggccagcatgctggactatgcgcgccaggcccagagcggccgcatgcattggtcgcaggtgtcggctgacatcctctatccggagcacccgatcgatccggcggaagtgttcgccaatgtgacctcggccaaggacgcctcggccgcactcgacagctacaacccgccgcagaagctctacaaggagctgaagaagaagctcgccgagctgcgcggccagggcgacggcccggtcatcacgatcgcggacggtccggcgttgagatatgtgccggcgcgcaagaagcaggccgcggtcgagatggacgatccgcgcgtgccggacctgcggggcaagctcggcatcaccgagaatgccgacagcacgaagtatgacgcgcaggtcgcgaaagcggtcgagaagttccagagcagcgttgatctcaaggcgaccggcgtgctcgacgagcgcacggtgaaggcgctgaacaatccgaagcgcgaccgtcagatcgacaccgtgctcgtcaacatggaacgctggcgctggctgccgcgccagctcggcgccgccaatgtcggcaatgcctatgtgatcctcaacatcccggactatacgctgaaggtgatgcagaacggcgcgcaggtctggaccacgcgcgtggtgaccggcaagcccggccagcatgccacgccgctgctgaccgagacgatgaagtacatcacggtcaacccgacctggaatgtgccgccgtcgatcatctacaacgaatatctgccggccctgcagcaggacccgacggtgctgcagcgcatgggcctgaagctcgagcgcaaccgcgacggctcgatccatgtctcgcagccgcccggtgaagccaatgcgctcggccgcatccgcttcaacttcccgaacaagttcctggtctatcagcacgacacgccggacaagtacctgttcgcgaaggacgagcgcgccttcagccatggctgcatgcgcgtgcagaacccggatcagtacgcatccgtgctgctcaacatcaccgagccgaaccagcactacacgccggagcggatccgcagcatgtacggctcgagcgaagtcgatctgaaattcccgacgccgatcccggtcaacatcacctaccagaccgccttcgtggacgatgccggcaagctgcaaatccgccgggacatctacggccgcgacgccaccatgctgtcgctgctcaagaacagccgcggcaaggatcttgaaacggtggtggcgcacgcccagccgagctacgcgcggccgccgagcagcagcctgcccgcaggcgtcaacgtcgccggcgacaacagcgggttcggctcctccggaccgaacttcttcgagcgcctgttcggcggcttcggacagccggagccgcagccggcccgccgcggtcaggcccagcagcagcgccgggtgatcacccgctgatccgagcaccggcgcgattcggataaatattgctgcaaaatcaacgatctcgttcaaaaaacgagatcgtttacgttaaccatttccggtgtcggccggggaactgggctatcttttgccacactcgcccagttagttaagcctaacttgggggcgggtcggtaaacctcggttaaccctcccgctttaagaaagcgttcaccgtcttccgcagggggtctgcgaggatgccgagcgaacgctcgtcgactgggtgggctcatagtgctggctgtcttcgcacgccgcttcaaaccgctgttgctgcctaaggccgggtaccaagctggcctgaccgcgctgttgcttttggccggcgcgggatcggtgcacgacgcgacggcgctgaaccagacccgcacgctctcgttccaccacacccattccggcgaagacctcaccgtcaccttcaagcgcgacggccgctacgacgaagccgcgctgaagcagctcaatcacttcctgcgcgactggcgctcccaggatgagacggtgatggaccgtcatctgttcgacatcctctgggaagtctacggcgacgtcggcggcaagcagccgatccagatcatctcggcctatcgcgcccctgccaccaacgccatgctgcgccgccgctcctcgggcgtcgcgcggcacagccagcacatgctggggcacgcgatggacttcttcattccgggcgtgccgctggagcagatccgctacgccggcctgcgcctgcagcgcggcggcgtcggcttctacccgacctccggctcgccgttcgtgcatctcgacaccggcggcatccgccactggccgcgaatgacccgcgagcagctggtcaaggtgttccccgacggccgcaccgtccatgtcccgaccgacggcacgccgctgaagggctacgagctcgccaaggctgacatcgaacgccgtggcaatggcgacgatgccgccatcatcagcaagccgaccctgttcgcaaagctgttcgggggcggcaagtcgggtgacgatgaggacgaaggcggggccagcgtgaacgacaagcccgccgccaacacggtggttgcggccgcggctcccgccaagcctgcggataccaaatccgccgatccgattccgctgccgcgcgccaagccgcaattcgccgccgcgatccagctcgccgccgccgacgcgcagctcgttccgacgccaaaggccaagccggcgatgcaggtggtgcagaccgccgagaacaccgcgccgcaatcgcccgccgacatcatcaatgcccgcggcttctggggcgacgaaacggccgcgccgaagcaggcgtcggccgcacagatcgccgcgctgaaggcccgtgaggcggtcggcggcgccgatccgcagaccacggccagcgcgaccgagaacttcaacaaggcgctcgcctatgcgcccgccacgtcgtcgccggtcgatcgcgccaacatcgtcgcagcgaccgcaccgatcccacgcaacgtgcgtccggcacgcaatgctgcggcgcctagcaccgaaatcaacaccgtcgtcgcgaagggcgcgcccggccagggcgtcatcacaacgtcggcgcggatctcggccgccaagggtaacgatgtctggatgcgcgtggtgatgctggcgccgagcgcgagcaatgccatgctgaccacggtgcttggcgacaccgacatgagcacgatgcgggctcacttcgtgaagccgcaggccaccgtcgccatgactttctcggaagatccgatgatgggtatgacctgcgatcacttctcgggctccgcgaccacccccctgaccacccagtccttcgtgctgcgcaccgcctcgctgcgctaaagcgcgataagatttggttgaatcatcatcgcgcttttgacctttgtttgagcatgatcttttcggaaaaccgcttcgcacttttccggatcatgctttagctcatcccgaaagccgtttgatcaagccggtaatcctgccttacgcaggccggcctcgtagcgcgcccggtcgggctcgcgcttcatcacctcggccgcatgggctgtcgccgccaccgagttgcccatctgcgccagggttgcggcgaggaacgcgtgatgggtgtggtcgggccgcgtgatgcgccgtcgacgatcacatcgccgagattgatgccgatgcgaaactgcatccaccgcgccggcgcgacgtcggtattgcgtttggccatccggcgctgcacctcgaccgcgcacagcaccgcatcgacgacgctgtgaaattcgaccagcatgccgtcgccggtggtcttgatgatgcggccgcgattcttggcgatggccggatcgatcagctcgattcgatgggtcttcaggcgcgcaagggtgcccgtctcgtcagcctccatgaagcggctaaagccgaccatgtcggcggcgaggaccgcagcgagccggcgctctggtcctggcacgtccatctgaacgatctgcccggttgccttaccgccagtctagcaaatcaggggatgtcgcccaagccgccatagcggctccgcagatgccatcgggagtaccttggacgagcggcctgacggcgtcaggcccgcccgcctgccgcctcaggccccgcgcgcccgtgtgagggtttccgagggcatctcgccatatgcgcggctataacatctggcgaagtcgctcagatgccagaagccgttggcacgcgcggccgcggtcacggtcaggagcggacttcctttgacgaggagcttgcggaccgaccacatccgcttcgaccgaaggtgctgatgcaggctgacgccgcaaatgtgctgcacggcagtctggagcgtccgaacggaaacgccgagcgtctgtgcgagaccggtgctgtagaggtcggcttccccgacagccgccaccagttcatccaggcgctcgacgagcttccgatgccggtcgaacgaaccgggaagcacccgcttgacgctatcctggaccaaggcgttgtcgagcccggcgatgagcgtttcctgcagttgcccgctcaacaactcgaattccctgagatccctgcagccggaagccaggcaaaacatgtccaggatcgccgatcgcagcgccagcatcttcgccggcgccagcctgaacagctcgattcccccatcgaactcggcccatccgcgattgctcatgtcggaaccgaatcgcagcatgagataggtgttcgcatgccgttcgacgacgtcgacgggcacccgaccacggatgaccccgatcgtggaatcgccaaccgcgttgccgttcatcgttgcatggaaggcgagaggaatgacgagcccaaccccgcgatttgctccgagatctccctccatccgccgggcgaacgatcgctgcagcacgagaaggcagtcaggaagcgcaaggatactccgcgaagccgagataggcgacgaatccagcggcgtgcttctcattccgccgatgacatcattgggacgaaactcatcgaagctgttgaagcgttcgacacgcagcaccggcgaaggatcgatccaacggacaggcatcgtgggctcctacgaaatcgggtggtcgagcaacgcctcgctcgagcgtacaattcccttcatcagttcgaccgccgaccggaagctgtcctcgccgacctgtccggccagtttcgcctgcacatccctccagcgcggcagcgcgcgggacaaggttttccggcccttggctgagatcgagatgtcgcgcacgcggcggtctgctcccggcacgatcctgaccagaccgcggcgctcgaggatcgtgacgttgcgagcgagcgcgctcggatccatcgacatcctccccgcaagagcccccatggtcacggtcgcctgccgcgcacaggctacgagcagcatgaattgcgtcggctccagcccgaccggcgcgaaggcctcggcatagagccgggtgatcacacggctcgccttccggacattgaatgcggcgcaacaactgccgacagcggcgagttcctcaggcgtcggcgagatgtcgtgcgtcatcaagaatccttttataggcatataccttgaatttatatgcatatgccgtttttaaatggttaagcacaagattccatgatcttgccggattccgataatctgattgattggccgattaagacagctcgctcaatatccccctgcaacgaggtcagcaccgaatgcgtgccaggggagaaacccaaatgccggacatcgtgagacttgatcgacgcaagcggcagctgcccgaacgaccactgacgcactgcgcaaagcctgtcgacgcatccgagctctggagtgcccggcgacagaaggcgcgggaagcgcttcaggaagcaatttttgcccttcagataagccacgcgcgaacgtcgatcatgatcgagaagatcgaggacgaagagagccgggaaaagctgcaatcccaatctgcgcgggtaagcaccttgatcgacctcgcctggtgtagactcggcgatatctgatgcggtgccgccacgagcggcagcggaggcgaccggcgatcaccgagcggccccaccgccggatagatcgacgatgcgatagcggccatcggttcgatcaacggagcacgaacatcaggacggccgccacccccatcacgacggttgcgatccagccgagcagcaccgttacccaacctgagacatacggtcccatcaccgaacgcttcgatgccaacaggatgatgacggccatcagcggcacggcgacaacaccgttaatcacggcgctccagaacaacgctttcatcgggctgaccggcgaatactgaatgagcaatccggcgatgacgctgaacgcgatcacgccgtagaaggcccgcgcgtcccgcacctccttctcgaggccttcattccaccccatcgcttccgcgagcgcgtatgccgaagatcctgcaaggaccggcacgccgatcaggccgacgccgacgatgcccattgcgaacaggatgaaggcgaaatctccggccagcggccgcaacgcgctcgccgcctgcgccgcggtctcgatgttcgtgattcccgccacatgcagcgtcacggcggtcgccagaatgatgaagtaagcggtgatgtcggaatagaacatgccgctccaggtgtcccactggatgcgccgtaactctttcgatgcagcagaagaatcggacacgagccccgccttgccttgcgccagcatatcttccacttcctcggaagcctgccagaagaacaggtacggactgatggtcgtcccgaagacgccgacgacgacagccgcgctgtccgccgtgaatggcaacctcggccatacggtatctcggagcacctgtccccagggcacgtgaacggtgagcagaacgcccgcataggcaaggagcgaaagggttagccatttcaggaagaagacgtagcgatgatacggaacgaagacctgaagcaggagtgtcgtgacgacaaaggccacggccatcgcatgcgcattgagcccgctcacgagctcgccgacctcgcccatggccgcgacgtcggccccgatattgatggtgtttgcgatcaatagaaggagaacgacgcccttgagaacgaccggcgggaactcggccttgatgtttgcggccaggccccggcccgtgaccctgccgatccgcccgcacatggattgaatcgccgccatgagcggaaacgccagcggcatcgtccacagcatgcccgtgccgaattgcgctcccgcctgggagtaggtggcgataccgctgggatcgtcgtcagcgacgccggtgatcagccccggacccagccgcgccagcggatgggccttgaggcgcgcgcggccagactggaggacgtcggacaggtttgcgatagtgccacgccgcgcgggcaacttcggcctgcttgcgtcgatgatccctagcctgtcggcacgtcgtcgtacacgctgcatgcctgctcccagctttcgctgcttctatagcttgccgcaccgggagaggaattgagccgcgtcaagcgccgccatccggattgcgccagatcaacgccccggatgatcagtcatgccaaagttcgggttgttgttcagaggaagcccgggacatgcagcacctcttcagctcggtccaacgctggttcagtgttttgggatggcaggacattgcgtccgccccgttcgactgcgtgatcgagctcgccgtgatcgacgacaagcgacatccgttgggcttcccctgcatccggcgcgtggacggattgttcaatctaagcacaatgcaggccgtgtcgacgtcgccgacgcactggcgctattggcaggccgacgtgctgccgatgtgctgttgctgaccgtggcccggctcgcctccatcggcaggttggcttccgttctgctcttgcggcaacgagccgcacaatccggtcgacggaccaactggacgctgctgctggcgctcgcctgcacggcgctgaccatcgcagctgcagcctcactggtgtattttcactatctggatcggccgtgatcgctcgccggctcgtcgtcagcgatggctcgccaggccgcgccgtcaaggtcgtcatactgtccgctcttcagcgaccagaggaagccgagcaggccgacaaagcccaacgcaagagcaagcggcaccaggataatcagaacttccatcagaccacctccctcgcacgcgccctcagcgcattgagcatcacgatgaccgacgagcccgacatcgccgccgcggcgatcagaggtgtgaccagcccggcgatcgcgatcggtaccgccagaacgttgtagacgacggcaagcgagaggttctgtcgcatcaaccggagcgccctgcgagacaccttgaccgccgccagcaccggcgcgagacgatcgccgagaaacaccgcatcagccaccgcctggctcatatgcgtggccgtaaccggcgacatcgaggcgtgtgccgcagccaatgccggcgcatcgttcagaccgtcgccgaccatcagcaccctacagccctgacccaccaactgctcgatccgactgatcttgtcgaccggggagaccccggcacgccattcgtgcacgccgagcatcttggccgcgagctggaccgcaggctcgcggtcccctgacacgatctcaacggcgatgcccatgcggaccaacccagccacgacctcggccgcgtctggccgcagccgttgtcgaaccgcgaaggcgtatctgctctcgccatagctgaacgcgacgactgaggcttccgggtcgttgcacagaatctcgttggcgagttcgccggcgccacagaatgacggacgacccagccggatcggacgtccgtcatgaaggccgtgaacaccctggcccggctcttcctggatgtccggcagcggcgccgccgctccggcgtggcgcgcgactgcggcggcaacggggtggcggctcgacagcgccagacgtccagcgagccgcacgacgtcctcgggaatctcagcgagattggcaacatcgagctccggcagggtcagggttccggtcttgtcgaagatcacccggtcgatctcggcgatgcgctcgatcgcatcgccggcattgagcagcaccccggaaccaaacagcgcgcctgacgcaacggtctgcaccgtcggaatggcaaggcccagcgcgcaaggacaggtgatgatcaggactgcgatcgccgtcacgatcgagtcatgaaagctcgcgccgtaggccagccaacccagcatcgtgagcaatgcggtcgcgtgcacgacgggggcatacagcctcgatgcccgctccgcgagccgcagatagcgcgaacgcgcctgcagcgcgcgatcgagcagccgggatatttcatcgagcagcgtgccgccggaggccgcggacgcccggacgcgcaacgtgccggagcggatcagcgtaccagcgaacaccgcgctgccgggcgcgaccattgacggcaaggtttcgcccgtaatcaggctctgatcgacctccgatcgcccttcgatcacattaccgtcgaccgcgcagcgctcgccgggccgcaacagcacgatgtcgcccggccggatcgcggccgccggaaccgtgctgatttcggttgggctgatgaacttcgtcgccgtctccgccttcaaggccgcgaggttaccggcaaacgcgcgagtgcgccgccgcatgttctgatcgagatagcgaccggcgagcaggaacgcgaccagcatgatcgccgcatcgaagtaggcatgctcggcatgattgatggtctcgatcaccgaggtcgccaacgccaatacgatgccgatgctgatcggcacgtccatgttgacgccgcgcgcccgcagcgctgacagtgccgaggtgaaaaagggctgagccgaataggccaccgccggcagcacgatcagcgccgacagccagtggaagaagtcgcgctgctccggcaacatgtccgaaacgttgccggaccacaccgggatcgacagcatcatcacgttcattgccgcgaaggcggcgacacccaaccggcgcaacaagccctgcgcgcgctgcgcttccaatgtttcggcatcatcgcgttggaacggataggccttgtagccgagttcggcgagcctgttcacgaacagtgccggatcgagcgcgcccgctttccattccagcgccagacgactgtcggtcaggttgacgcgggcggaagtgacgtccggaatggtcgacaggttgcgctcgatcttggccatgcagcccgcgcagttgatgccttcgaccgcgagatcgagatgaatgagcccgccgcccgcgctcttcaggtaatgtgaaaaatcgatctccgcctgcatggggccaccctcaattcaggacgacgcggttcttcgacaggaacatgcgccggccttcggcatcgccctcgatcacgaggtcccactgccccgcgctgatgccttctgcgcggccatgaaaacttcccgagcccgcttcggtgacctcgatcgcccggtcagcacgccgatcggtagggcgttggagacgggcgagaaagttcagtccagccagtggcgcgccggcatggtcgcgcgcttcgattgcgactgcggcagcgccgtcgggccgccgctcgatatgcgcctggacttgccagccgcgctcgttctgctgccgcgctgccaagatctcgcgctgataggcgaggctggcgctgtaggcgctgtcgacctcggtgcccggcagcgtcgtgatggcgaaccgcatcatgaccatgttgacgctgatgacgactgcgaagaacgcgaccgtcgtgatcaggacgaagcgtccggtgatgggtcgcgcggttgagcttgtggctgccatgattgaattccgccgttatgggagaacgaaatggtcggttgcggacgccacttctccaagaccgatatctgtgacgcggaaggtgaccggcacggacttttcggccttttcatcgaacggcgccgtcaccagcacacggagttcggtggtggcgtcgcggccgaggatgatcatcggccggtctggcgtgacggaatctgcgccgatgacgtgaagcttggcctcggccgggccgtcgacatcgatcgcgatcacgcgatcgaaaccgcgcttgttgaggaaccgcaaggtgtaaccgttgcgggtcgccccatcgctgagccgcacggcgatcggattgcggtcgtgcagcacgttgacgtcgagcagcgtccgcgacatcaaggcgtagagcatgacggcgcagaccacggtgatcaggccggcgtaaacgacggttcgcgcccgcaccggcttgaacacctcctgcatgccgccgatacggcgctgcacattgatgtcgttgtcgtatccgatcaggccggtcttgcggctcaccttggtcatgacggcgtcgcaggcatcgatgcacaggccgcactggatgcagcccagctgtgcgccatcacggatatcgatgccggtcggacatacggcaacgcactggttgcaatcgatgcaatcgcctgccttgtcgccgagcgcacggatgtcgaacgccttcttcaccgagcagcgcggctcgccgcgatcatacttgtaggtgacgttgagcgcccattcgtcggtcagggcggcctgaatgcgcggccacgggcacatatagacgcagacctgctcgcgcatgtagcccgccagcaaataggtcgatgcagtcaggatcgcgatccagacataggcaatcgccggagcctgaaacgtcgccagattgcgcaccagcgtcggcgcatcgtcgaaatagagcacccaggcgccgccggtccaccaggcgatcatcagccagatcgcgtgcttcagcacccggcgaccggcgcgacgcgcggtcatcggtccggaatcggccttcatctgcgcgcgacggtcgccttcgaccaggcgctcgaccgcatagaacagatcggtccagaccgtctgcggacacagataaccgcaccagattcgaccgcccagggcattcatcaagaacagggtcagcgcagccagcaccaacaggccggtgaagtagtaaacctcctgcggccacagctcgatgaagaagaaatagaaacggcggtttggaaaatcgatcaacaccgcctggtcaggcgcgccgaggcctcgattccagcgtacgaaaggcagcaggtagtaaatgccgagacagacggccatcagccgccatttgatcgagcggaaccggcccgacacgctctgcgggtacactttcttgcggggcgcgtagagcggcccgtcttcgtcggttatgagttcatcaggcgacacgggcttgttcatcggtctgctcgaacgaggcttcgattgcagcctacattcctgcgccgggtgccaattgacctcgatcaacggcccccggatcggcgcgggaggcggctacttgccgccacccagggagtgcacgtagaccgccatcgctttgacggtgaccgggtccagacgacccacccaggctggcatgacgccggcacggccgttggtgatggtttcgaccagcgtgtcctcgtcggagccgtagagccagatcttgtcggtcaagttcggcgcgccgacctcctggttgcctttgccgtcttcaccgtggcagctcgtgcagttctcggcgaagatcttcttgcccgccgccgcgtcgaacttgggcgccgtggaaaggccggacagcgaacgcacgtagttggccaccgtgacgatttcgtccttcttgagaaccccgtcgcggccaaacgcgagcatctgcccctcatgcgccttggggttccccgagcgtgcgccgaactggatcgtctgcatgatctgatcgagcgtgccgccccacagccagtcgtcgtcgttcaggttgggatatccctttgcaccggcacccccgctgccatggcaaggcgcgcagttgtcggcaaacacggtcttgccgcgtgcacgagccagcgccagcagggccggatccttctcgatgtcggcgagcgacgcgctgccgagaaccgccatcttctcgccgcgcagtttctccagatcggcaaggtcggtcgcgacactcgcgcgcgtcgaatactggaacagccccgtggtgtagcccgagaccagcggccaggccgggtagacgatccagtagccgatcgcccagatgatcgtcgcatagaatgtcaggacccaccaccgcggcagcggcgtattgagctccttgatgccatcccattcatgaccggtggtgctgcggccggaaacgcggtcaatctcgtcgtgctcgctcatgatcggtcagtcctcacgcagcggcatgcgggctgcggcgtcgaattgggccttgttgcggggccaaagcgcgtaggcgacgatggcgatgaagattccaacgaagacgggcgtccaaagcgtgctgatcaggttcgacgccaggctctcgatttgaatgatcgctttcatgctcgcccctcagcgcaggttggctttttcgttgtagagcttgaagtcgacgagcgtgccgagcatctgcagataggcgatcagcgcgtcgagttcggtcggattgccggccttgccgtcgaagttgcggaccagggccttcggataacgcttctggaacgcgtcggagcccgggccgtcgggatcggtctgcgccttcagatcggcggccgcattggcgatctgctcttcggtatagggtacgccgatcgcgcggctcgtccgcagatgggccgcgatgtcggacagatcgagttccgtccttgcgagcgaaggatatccgggcatcaccgattgcgggacgatcgaccgcggattgatcagatgcgtgacgtgccaatcgtcagaatacttgccgccgacgcgtgcgaggtccggcccggttcgcttggagccccactggaacggatggtcgtacatgctttccgcagcgagcgaatagtggccgtaacgctcgacctcgtcgcgcagcggccggatcatctgcgagtgacagagatagcagccctcgcggacatagatgttgcgaccggcgagctcgagcggcgtataggggcgcacgccgtcaactacctcgatcgtgctcttcaggtagaacagcggcgcgatctcgacgagcccgccgatggcaatgacggcgagaatgccggcgatcaggatgatcgagttcttctcaaagatcttgtgtcggttccagagagacattgcgcgacctattcggcgggctggagggcaccggccccctcggtttcgctggcttggccggcattgaccgtcatccagagattgaaagccatgatcagggcgcccaccaggaacagcgcgccgccggcggcacggatgatgtagaaggggtgcatggcctcgacggattcgatgaaggaatattcgaggaagccaagcgacgtataggcgcgccacatcaggccctgcaggatccccgacacccacatcgcggagatgtaaagcacgatgccgatggtcgagatccagaaatgccagttgacgagcttcaggctgtagagctggcggttccacagccagggcaccaggcagtagagcgcgccgaacgagacgaagccgacccaaccaagcgcacccgaatgcacgtgcccgatcgtccagtcggtgtagtggctcagcgagttgaccaccttgatcgacatcatcggaccttcgaaggtcgacatgccgtagaacgcgaccgacaccaccatcatacgcagcacgggatcggtacgcagcttgtcccaggctcccgacagcgtcatcaggccgttgatcatgccgccccaggacggcatccagagcatgatcgagaaggtcatgccgagcgtctgcgcccagtccggtagcgccgtgtagtgcaggtgatgcggaccggcccagatgtagaggaagatcagcgcccagaaatggatgatcgacagccggtaggaatagaccggacgctccgcccgcttcgggatgaagtagtacatgatcgcgaggaagccggcggtcagaaagaagccgaccgcgttgtggccgtaccaccactggaacatcgcatcctgcacgccgccccaggcgatgtaggatttcgagccgaggaaggagaccggcaatgcgggattgtttccgagatggagcaccgcaatcgtgatgatgaacgcaaggtagaaccagttcgcgacgaagatgtgcggctccttgcgcttcaccagcgtcatcaggaacacgagcagataggtcacccagacgatcgtcagccaaagatcggcataccattccggctcggcatattccttcgactgagtcacgccgagcaggtagcccgtgccggcgatcaagatgaagaagttgtagccgaccacgacgaaccagggcgacaggtcgccggcaaggcgcgtgcggcaggtcttctgcacgacatagaaagacgttgcgatcaggacattgccgccgaatgcgaagatcacggcagacgtatgcagcggccgcaatcggccgaatgtcgtccagggcagatcgagattaagcgccggccacgccagctgcatcgcgatgatcagacccacagtgaagcccgcgatcccccagaacatcgccatcgcggaagcaaacttgatcggcccgagattgtaattggggcgcccaccgatctcagccggcggcggttcggccggacgatcaaggtagcggttgccgatcacgatcacggatatcaggctggcagcgcagccaagcgccgcgtgaaagctgaacgctgcatcgtgccccatcgccgcaccgaggagacaagcaaacgcaaaaactgccagccccgataccaagccggcttcgcccatcgtcatcgactttgcaacagaagacggactggtcatgtggaggctttccttggctgcgatgacgtcatgggaaccacaatctcgccggcatccgcttgatcggcatcaattccgacgctacgccgctctgcactggcaacgcggctcagcgcggtcagggtgaattcgttcggacaatactttgccggactggcgcgcctctcccgcgctaggtcgccggcacagcgcgccgtctcacggcacagcccacaaacacgctgcagatcgcgcagcacatcactatgagacgaagcgagcgcttgttctgacaggcctgcatgcttgaggcgcttgtacagcaattccggcgagccacggccgcgcgccaaggctcgaagatccgatgccggaagattgagctcgtgggcaatctcatcgacctcccgagcggtcatcagatcgaattcgtggcggcgggcgagaaatgctcgcaagcgcgcgacgagactctcgaattgcggcgagctattgctaactggtcgatcggccattttttgcaccccttcgttccagccttagcggatggctcggattccgatttgatgtgagtcaaccacgcgccatcacgctcgctgagctttgaatgctacccgaggtcactacccaccccatgcggacggcaacgccgacggcattcgaagctccatcgaatccgcaaagatcgtccagtcgcgaacgcccttctgtctgcagaagtcggcctcggcgagctgcgcggcggcggagagcgtggtggcatcgaccttgaacgccgcctgacaggcacggtgttcgtggccggtgtcgtcgcaaacggtcttgatgaaacgaatatcaaaggacggcatggcaccctcgcatgtgggctgattctttggttgccgatgctgctatcgaagtgagtatcccgctttgatctgccgcaacggaatgcgatccaaatgcagatttcgtatcgtgagagacgcatcgaaatcatgcgccttccgccgcgagcttccgtccatatgcgccacgacagctgcaatgcgatggaggcgggcaagatcgacgggcacgaaggccagatcgctctacttgcggagagactcctcgtccggggacggcgctcgggtcgacggtggcgacgccgcgccaccgctcacggtccatgccgacgctgcgactgcaaagcccacgatcgcgcagattatcagcagtgttgcagccacccccaaggtatccgcaccgatcgtcgcgatcacagccaatggaatcagcatgtttgcgagtcggacggtcaacctgccatcccgtgcgttgctcgggcggcagccacccgctcgtcttccgcggactggatatagaacccggaataggtgtcgacgtagcacagatgatcgtgcacttccttgacgccggcagtattctccgcggcgacgatagcggcctgcctggcccgttcgtccatgatgacgccccggaggtgcaccacgccgttgtggaccgagacctgcagaccgagcggacaccaattcgcagaatcgagcgcgcgcacgatgcggtcgtagatgtgcttgtcgtccgccgtggggtcgggaatctcgtgagcgatggacgctactgcccgcaacagatcggatcgtgtaacaatgcctacgagccgcccgtcgcgcatcaccggcagccgcttgatgctcttcttctccatcagcccaaccagctctgacaaaggcgcttcttcggtcacggtgacgggatcatacgacatgatctctccgaccctccgtccgcgctcgtggacgaagtccgtcgccgcgctgcccgagccgagaaggaatcgaagccagcgagggcggcggcgctgcgtgccgatctcgcttcggcgcaagaaatcgctttccgacaggatgccgaccaaccttccggccgcatcgaccaccggcaagccgctgatgtgatgatccaacatcaacttggcggcatcgagaatggaggcctcggttccgaccgtgatgacatgtcccgccatgatctgatgtgcgcgcactgccgttctcccttcaaggcttggcagcaaaccctcacatcaaatcggtctattcgctttgatctttctcaacgtccgctgttgacggggatcgaggcgcggcagcccctgatcggagatacgggcgtcccgtcgagagaagagaaccacgctgcagaacctgctcgcctcgatcggagttctcgcgatcgctgtcgtgatcctggcccggatcctcctgtcggcagggcgtcccttactcaggcagcctgcaggaactggcaacctgccaaccgcggaccgctttagcccgcgcgcgccgattggttcgctcatgcgaaatctttgacctgcgtcaatgcggagctgtgcgccgccgctagaaagttgtcatccgtcgggatcgtgcaaatggcagacgtaagggcttggcgccccattctattcttgtgtccaaataccggtgatcgagttcagggcttgcttcccggcgacacatccgaacctgtggcagacgatttgcatacgatttcctgcgcagcgtgcgacggcgtccatttcatcaacctgagaaccggtgcggttatcgggtctgaacgcgcttaggttgtcggccagccgctacgggccggatgccatcgagttgacacatatcaacatacaagcgccgtcagcatgggaagcagaacctccctcaacgaaggatgtcgaacatgacagaccgcagcgaaacccctcccatcgccgacgccatccagagcaccgcgaaacgggcgatggccgtacaatcggaattttcggagaagctgatcgaggcgaatcagcattggttcgagcagatccagatcgaatcaaacgaagcctgggagctgttccgcaagttcaactccactgcctccgtggcagagaagatcaccgctctgcaggactggaccaagggcgtcacggcgcgcaccgcgcaggatgcaacgtacgcgatcgagatcgcgcgctcgctcggtttcatcgagctcaacctgtttgggcgacggaccggtggcgccgaccgggcggctcaggaggctgcctgacgtgccagcacacgatgctccagagcgcccggaggcccgcgccagcgagacatgggagggggtcgccaccgcccccttcgatcgagacctcgagctcgccgtcatcgaaggtaacgccattcacaagctcgtctttccctgccgtcggactctaggtggctgggtgaagtcagggaccgtcgagcgtatcgtggtgcagccgacgcactggcgctcttgggccaagtaggttacgtcacctgccgcattaggcggccagtggcttccagcgctcgaacgttgtaatgttggatggttcgagggctttgcccgggggaatatgtccgacagcatctggtaccgctatggcactgccgcggcagcggtcgccctcgtatttgcagtgcgcgcgggcatggacaactatttcgaggatcgctccttcacgatcatctatgttcccgccgtgctgtttgccgctttcgccggtggccgcggtccggcgatccttaccacgcttctttgtcttctcatcagcgccaagttcctgggcagaagtctggtcactgagcccggaaatctgatcgatatcgggtgctttacgatccttggtccgatccttggcttcatgggtgaccgcctgctgagggagagcgatcaagcccgaaatcgccaggcccatctgcagtcgatcctggataccgtcccggacgcgatgatcgtgatcgacgaccatggcagcattcgttcgttcagcgcggcggccgagcgcctgtttggctggaaaacggaccaggtcatcggaaagaacatttcgagcctgatgccgcaaccttatcgcggcgagcacgaccggtatctcgaacgctatctcacaactggcgagcgacgcatcatcggcatcggccgcatcgtggtcggagagcggagtgacggctcgacctttccgatggagcttgccgtcggcgaagccaaggtacgcggtgagcgcttcttcaccggctttatccgggatctcaccgaacgtcgtgcgcaggagcggcggcttcaggaactgcaatcggagctggtccatgtgtcccgattgaccgcaatgggcgaaatggcatcgtccatcgcccatgagatcaaccagccgctatcggccatcaccaactacatgcgcggcgcgaaggcactgttggtcccggagatgccggacgcgatgcgcattcgagacgcgctcgagcgtgccgcgcagcaagcattgcgggccggcaacatcatcaagcgcctgcgcgagttcgttgccaagggcgaaacccagcactccgtggagagcccggtcacgctgctcgaggaggccgtcgcgctggcgctgctcggtgccaaggagcaaggggttcgggtggcgatccgcagcgaccgcgacataccctcgatcatcgtcgacaagatccagatccagcaggtggtgctgaacctggttcgtaatgcgatcgaggcgatggcttccagtccgcgccgcgaactgacggtgggagtcaccaagacggatggcgtggcgacattcattgtggccgacaccgggcccgggatcagccccgatgttgctgaccgcttgttccaacccttcatcacgacgaaagaaaacgggatgggcgtgggcctctcgatctgcaggacgatcgtcgaatcccatggtgggcgcatcgttgcgttgccaaacgccggcggaggtacggtttttcaatttaccctcccgtttgcggaggacggagaagaagcatgacgacgcgccgcacgatccttgttatcgacgatgaccccgcgatgcgggattcgctcgcctttctgctcgatgtcaacggcttttccgtaacgactcatgagacagccgccgatttcctcgatcatttcgggagaagcaacgtcgattgcgtcgtatccgatatccgcatgcccggcatgaccggcctcgacctggtccgcaagcttaaggccgatgcagtggcatgtccggtcatcctgatgacaggacatggcgatgtcgcactcgccgtcgaggccatgaaggcaggtgcgatcgactttatcgaaaagccgttcgaggacgaggtgcttctgcacgcaatccgcgatgccctggactcgcagccagccaaaccggcagacgacaccgccaagcgccaggcggagacacgtctcgcggacctgacaccccgcgagcgcgacgttctgagaggcctgttggcgggaaagatcaacaaggtgatcgcccacgacctcggcattagtccgcggacggtcgaagtctaccgcgcaaacctgatggccaagaccagtgtccgcagcatgtcggaactcatgcggatcgcgatcgcagctgggctgtagagatcggtcgcaaggcaagcacggctttgcgagcagcctcgcacatcgaggtgccgccgctaggcggcggcgggccgagctcgctcagccgcgagtatcgcagtcagttcctgctcgatctcggctgtcagattcaaactgatcaacaccgagccacgatccatacgcgccacgacaccgccaagccggaatgaaagtccgtcgatcgccagttcgacaggctcgccgatcattgcgtccggcagttcgcactcaatcgacaccgcccccaacgacacatcacgaacttcaatgcgcctcgtctcgccgcgacgcgccagcgtgccggcccgctggaagacaacacgcgacccggcccggcggtcgacatctgtcgtcgaggtacggatgacacgaataagcgtcgtgcgcagctcggttacattctccgcgattgccgccgatccgtcgtgtatttccgatgcccgccgtccggtttccaccgcttctgccgagaccgatgcaatctgggatgcgacctcgcgggcagcgtgcgaggtctcttcgaccgtccgcgagatatcggccgtgaccatgttttgctcttcgaccgcgacggagatcgcagccgacacggattcgacgctgcggatcatctcgccaatggtggtcatggatgcaaccgaggcatgcgtcgcctcctggatctccgcgatctgctgagcaatctcactcgttgccttcgccgtctgttcggcgagcgacttcacttcagccgcaacgaccgcgaaaccgcggccggcagttccggcacgcgcggcctcgatcgtggcgttcaatgccaggaggtttgtctggccggcaatttcgctgatcaggctcgttaccgttcccactttcgaggcagcttccgacagcttggcgatcgtggcctgggcttgcgtcgatgccgtcacggcctccagcgtcaacgaacgcgatgtccccacctgatcggcgatccgcgagatcgatgcggcgagctgtgaggatgcctttgcgacggtctgcgcgttggtgagcgcctcttcggctgcggccgcgacactgctgctgttcctctccagcgtgagcgccgtatccttcatcatcgacgcgtttctggccatccgatccgtaccggacgcaacctcgccgacagcggctttggtggcattctcgacgttctcggccatcttccgcagcgccgatgccctggcttcctcggccgcgcgccgcctctcttcgtcctgcttcgcctcgtcgcgcaccttttcggcagccttgatcctgaaccgttcgatcgagcgggccatgtcgcccagctcgtcgcgccgctcgagtcccgggagcaccatgtcgaaatcccccctactcaaacggttgagggcgcccgtcatggtggcaagggacgcggatacccgccgggcaagcagcagggttgtcagtccaacggacagcacgatcgccgcagcgaccatgatgacgcttctggcctgctcccagagctgggcctgaagatcgtcgatgtacacgcccgttccgatcacccaattccacggtcgaaagcctgcgacaaacgacagcttcggctgcggcgcatccagccccggctttggccattgatagtcgacaaacccctcgccttgccgtttcacgatctcggcaaattcgacaaacagccgcttgcctgtcggatccttgatgtcacgcaaatccgtgccgtcgagctccggcttgatcggatgcttgatcatcgtgggtcctagatcgtttatccagaaatagtctccgttcccgaaccgtagcgcgccgatcctggccgctgcattgcggcgagcagtttcgtcggcaactcccctgcccgcgacagcagcgtgctcctcctgcgcgatgttcagagccaattgaataaggtgcctcagctcgctctgccgctggccgcgcaaggcgtctgcgagagagctcgtctgcacaacggcaaggccggtaagtccgcaaaggctgagcccgatgattgcgtagatgcgctgcgccagagagattctgagtttcattttcttgtcaccagccaaaggcccgtccgaactgatgaggactattgagccgcactacttagttcacgtaaagcgcactatcggaattcagcaacggaccgataatttattgattggacacggcaagaagccgcatccaaatccgggctatcaccaaccggacgacggatgaccggtcggcggccggtgacaagcgttggtcgggagcggtatcgaaccgacctcgatcatcaagcagtgttcctgcgcgacggcaaactgcttgagcagttgatcatgctgctgcttcagcgtcgcacgggcacatcccgccgggcacgcagcgacgagttcgccgacctgaacgatctgcagctcgagcatccgcatgatcttttggatggagtggtaagcgtccatggctggccgcctctcccaatgctgctgctggcttgatcccggaaagcgtacaacttttcccactaccatctccaatccaacgatgggggaagaatgcattctggcatcccctcccttgaaccagacattttgtctggaagcagaaagtccgcattgatccaggtcaaaacgaacgtcccgttgcagatgagctagatcaaaggagcagctgcggtgtcatgcactgatgcacagcgtcccggtctcaccgggccgcgacatcaagaacgccaatacgaggaaacgcacgctattaccggagcagtggatccgagggagggatcgatggaagagatcacgcatttcattgcagtgccatatgaccgggccgaccgtgagctcgtttcaggtcagcagatcaaatgcgctaaccccagttcggcgatagagcacgccaagcacttgtggaagacattcggtcatgccggggctgccgcgattgtccgtaccggccatccagaaaccagaaccatggtgctgaggacctacggcatggtgccacacgacctggagcaggagcctcggcgggtcgcgagctgacacggacgacttgttcgcgcgaaacacgtccgcatgacgaggtttcgccgccggcggtatcccgtcaagtcgaattgacctgacgcaaggttcgcacacgctggatcctgcattttccatggaaagaaagggcagacatgcgctcggatctcgcacgacaatacggacaggatcggcttccccgctatacgagctatccgactgcgccgcacttcggccccgcgatcggtgttgcagattatcggagatggctcagatccattcccacacggcgccccgcctcgatctacctgcatgtacctttctgccgatccatgtgctggtactgcggctgccacacctcggtgatgaggcgagacgaaccaattgccctttacacctctggcttgcgcaccgaggcgcatcttgtcgccgaaaccatcggccagcgcctcccggtctcacacatccacttcggcggcggtacgccgacgatcatggcgccggaggcgttcgccgacctcgtcggcgcgctgcgctattcctacttcgtgctgcctgatgctgagatcgcggtcgagatcgatccgcgcaccctcacggagccgatggccgaggctctcggcttcagcggcgtcaaccgcacaagcctcggcgtacagagcttcgatcccgatgtccaacgcgccatcaaccgcatgcagagtttcgagcagacggcaacatgcgtcgaacgtttgcggcgggccggcatcgacaagctcaacttcgatctcctctatgggctgccgctccagaccgtggattcgtgcctggatacggtcgccaaatgcatcgagctccgtcccgaccgcttctcggtgttcggctacgcgcacattccgtcgttcaagaagcaccagcgtgcgatcgatgaaagcatgcttcccggcagcgcagaccgccatctgcaatcggaagcgattgcagatgccctcgtcggcgccggctacgtgcgcatcggcttcgatcacttcgctctgccggaggatggtctcgcggtggcgaaacaggacggccggctgcgccggaacttccagggttacacggacgattgcgcggaaacgctgattggcctcggcgccagcgccatcggacgcacgccgcatgggttcgtgcagaacgccgtcgcgatccgcgattatctggcctgcgtcgccgaagaccgactcgcaatcgtgaagggctatgcattcaccgatgacgaccgcttcagagccgacatcatcgagcgggtcatgtgcgacatggctgtcgacctctcgcaaatcgccctgtctcacggccgggatccgcagaccgcgatcgtcgatcgacgacggctcgagagcttgatcgcagacggcgcgataaccgtggacgacggccgggtcttcgtaagccacggagcggaattcctggttcgcagcgtcgccgccgcattcgacgcccacctcgcgcgttcggtagcaactcacagccgggctgtctgaccacgctccaggacgatcgacagatttccggcgaagaagttgcgctggctcagatcgcggcgaagcgtgacatgcttgaagacctcactggcacgagcagctcattctccctggaggttgtctcgatactcaatgcccggccgcttcggccggctcttttttgcctccgcgcgagttggcgcaagagcggcgccggagccatcgggaagcaatgtttcccgcaaccatgtagctgctacggccgaacgtgggtacaccctctgcgggtctggcggccgatgggtgacggcttcgcggtacccttatgtcctgctcttcgcccgagctccgctccgtgttgtggcgtgagaagcgcgtgcagctcgtatccccagggcttcgcgaacatcatcgtcttcaacaacatccaggaaccatcggcgatcggcggaatcttcgcaacggacattcgcggtgtcctcgtggcgtgacgctggctgcacgatagggagtttcaccgggtgggtcatggcaacgctcgtcagaatgagagaacacctgccaacatctgcaatgacccgcaccggtgcattgagcatcgtcaattcgcaggcatgacacgacgtgcccttccgggaagtggccgcgaccggggtctcgcagtatcaggttccacttcgaggcaatctagcccggtggcgcggattgacacgcatgtttgcgctggctcaagccattccggtcatattggccctctaacatggaaccgatggacgcgttcgagatcatccctgaatcctgcttcgggagaacgacatgcaattgacgacgacttcaaacgaacaagcacgtacggatcatctcgagttgctcgatcgctactggcgagccgccaactacctttccgttggtcagatctacctgctcgcgaacccgctcctgagagaaccgctgaagcccgagcacatcaagcctcggctgcttgggcattggggcaccacgccgggcctcaacttcatctatgcgcacctcaatcgtgtgatccgcacctccgatctcgacgtcatctacatctgcggccccggccatggcggccccggcatggtcgccaacacctatctcgagggcacctacacggaaatctatcccgaggtgacgcgcgacgctgaaggcttgcgaaagctgttccgccagttttccttccccggcggcattccgagccatgcggcgccggaaacgcccgggtcgatccacgaaggcggcgagctcggctatgcactcgtccacgcttacggcgcggcgctcgacaatcccgacctggttgtcgcttgcgtggtcggcgacggcgaggctgagaccggcccgctggccgcgtcctggcattccaacaagttcctcaatccggcgcatgacggcgcggtgctgccgatcctccacctcaacggctacaagatcgccaatccaacggtgctgggccggatgacggacgaggaagtccgccatctcttcgcaggctatggctacgaggccttgtttgtcgaaggcgacgatccgcgcacgatgcaccggctgatggccgacacgctcgacaccgcgctcgcgagtatccgctccatccagcaaggcgcgcgccagcaggcgtcgggtttcaagcgaccggtatggccggtgatcgtgctgcgaagcccgaagggatggaccggaccgaaagaagtggacggattgaaggtcgagggattctggcgggcccaccaggtgccgatcgccaatccgcgtggaattcccgaacacttgaaactgctcgaacactggatgaagagctacgagcccgacaaattattcgacgccgacgggcggcttgtagcggagttgcagcaactcgcgccgcggggcgatcgccggatgggagccaatccgcacgccaatggcgggctgctcaagcgcgagctcaaactgccggatttccgcgcctatgccgtcgacatccctcgtcccggcggtgtcgtcgccgaagccacccgcgagctcggcaagttcttgcgcgaggtcgtcaagctcaacgcagtcgcgcgcaatttccgcatcatggggccagacgagaccgcatccaaccggctcgacgcggtgttcgaggtcaccgaccgggtctggatggaaggcatcgagccctacgacgtccacctcgcccgtgacggccgcgtaatggaggtattgagcgagcacctttgccagggctggctcgaaggctatctgctcaccggccgccacggcttcttctcctgctacgaagccttcatccacatcgtggattcgatgttcaaccagcacgccaaatggctgaaggtctcgcgcgcgctgccatggcggcgcccgatcgcctcgctgaactatctcctcacctcgcatgtctggcgccaggatcacaacggtttcagccatcaggatcccggcttcgtcgatctcgtcatcaacaagaaagccgacatcgtgcgcgtctacttcccgccagatgccaatactctgctttgggtggccgatcactgcctacgcacctatgaccgcatcaatgtaatcgtcgccggcaagcagcctgctccgcaatggctgccgatgcgcgaggcgatcacccattgcgaggcgggcatcgggatctggaagtgggccggcaccgaggcgccgaatggcgagcccgacgtggtgatggcctgcgccggcgacgttccgacactggaaacgctcgccgctgtcgatctcttgcgtgaggcgttgccggatctcaaaatccgcgtggtcaatgtcgttgacctgatgacgctgcagccaagggagcagcaccctcacggcctgtccgaccgcgacttcgacagcctgttcacgcgggacaaaccggtgattttcgcctatcacggctatccctatctgatccatcgcctgacctacaaccgcaccaaccatgccggcctgcatgtgcgtggtttcgccgaggagggcaccaccacgacgccgttcgacatggtcgtcctaaatcagcttgatcgtttccatctcgcggtcgaagcgatcgagcgcgtgccgggcctcgacatcgctgccgctcacatcaagcaacaattccgagacaagctcatcgagcactctcgctacgtgcgcgagcacggcgaggacatgccggaaatccgcgactgggcttggcgcgaccgcgcagatggcgtcaaatcgctctgagcggggaagccgccaatgtcggacaatgtcctggtgctcaacgccggttcttccagcatcaagttcggcctgttcgacatcggaccggccgagccggagctgagatgcaagggcgtgctcgacgaacaggagaaggcgccgcgcatcgtggtgaccgacccatcgggcaagcagctgttcgagaaacgccgctcctgcgacgaaacgaccgatcacggtctgctcgccgatatcttcagctgggtcgacgattatctcgaggccgacccgctcgtcgcggttggccatcgtgtcgtccacggcggacgggacttttccagccccatcgcgcttgatgaacgaaccatcacggcgctcgacgcgctgacgccgctggcgccgctgcatcagccacgctgtctcgccccggtccgggcagtgcaatcgctgcggcccggactagcgcaaatcgcctgctttgacaccgcctttcatcacggcctgacgccgcctgccagccggttcgccattccccggagccttgaagagcgcggtatccgccgctacggattccacggactttccttcgaatatgtcgcagaccgcctcacaacgctcgccccgacgcagacacgtatggtgatcgcgcatctcggcaacggcgccagcctctgcgccctgcagaacggcaagagcgccgacaccacaatgggtctgactccactcgacggccttgtgatggggacgcgctgtgggacgattgatcctgggattctgctttatctgatgcaggaagagaagatgacggtcgacgaggtgcagcacctgttgtacgacggttcgggcctgctcggtgtctccggcgtgtcagccgacatgcgcaccctgctgacaagccgcgagcctgccgcgcgcgaagccatcgagctcttcactttccgcgttgccgctgaagtcgccgtgatggcgaacacgatggccggcctcgacggcttgatattcaccggcggcatcggcgagcatgccgccgaaatcaggcagcaaatctgcgaccggcttgcctggctcggtgtccggctcgatccggcggcaaatgcgaagggggcggcgcgcattgcagctccaggcagcctggtggacgtgttggtcgttccgaccaacgaggagatgagtattgctcgacactgccgccgattgctcgttgctggcccctagcctcgctcccggcttgccgccgcgccgccacgtccgccggcttccgctcactcagattccggattcctgcatgatgcgttcaatctcggcgaggagctggcgaagctcgtcgaccgagaaagtttcaaggatgtccgcgatctgctcccgcagttggatttgctcgttaacttgtctcagattgtcccggtcattctgtgccattgctcccctcggcaaaatcgggccggagcgtcccggctatcggccgccggcaagtgccatcgcgatgcaccggcgctggcgcctgcgtagcgcagccgaatgcgtcaatcacttaaggggaagtacttagttcccgctcaggacctcggcactcatgcccccgatgatgtccacgtgacgagcttgcgcgccaatgcaccgaaggcattgtcgaaggcggttgcggcattgtcgggcgagagagccgcgaggggggcagtttcctcgaacaattgtgcagccttgatctgcccatcggagcccacgatcttcgccgacagcgccatgaccgccttcggctgcggcccaagcgcgatctcgaagcgccgcaaatcgatcagcaggcgcgggacgccctcaacggagctgtcggcacgcaacggcgcgtgagaaatgtcatagttttcaaagctctgctgaaggcgcgcttgcagcagcaccggcaagctgtcgccccattgtgcgtccgcgaagccggcgacgtcctcgtcaggcgtaaacaggaaacgctgcgtttgcagacgcgcgatcgcggtcggctccgccatcaccatgggggaaggcaacgatccgccgtgctgcgggccgaattccgcaacggcgtgaagatcgtagacaaccttgcggggcgcaggagctccacccgtcatgcgctccagccccgccacgatgccgtcgagcttcggcgtgttgcgtgccagcccctcggcaaaggtgccgaggttctcaatcgtgctgtgcagcggcgcggaattctccgacaggacggcatcgaccctgcgcagcgcatcgcgggcagcttgcgtcaggctccgcccggcgcccttttcggcgaccagcggcgcgcgcgccggcggcgctgcgggatcatcgcccccctctagcgcgatcaccgggacgccggtcaggccctggaaatcaacgccgacacgcgtgtcgctatgcaccggcgtgcgctcggcgacggcgatcgtggcgtgaacctcgcgagggcgctccggcaccagttcgagcgcggtcacctcgccgacgcgaatgccgttgaagagcacgcccgcaccaacgaggagccccggcacgggatccgtgaacacgagttggtagctctctcgcttgccgatgccgccgacattgtccagccagtagacaaagccgaacacggcgacgatcgccgacaatacgaatgcaccgacgacaacatagggcgcgcgaatttccatatccatctcccctgcctaggtgccaaaaccaagcgtctgggcccgcgcaccgtgaaagtaagccttgacccagggatggtcggattcgagcacggatgacagcggccccaccgttacgattcgcccctcggcgagtgcggcgacccggtcgcaaatcgcctgcaagctgttgaggtcgtgcgtcaccatgaacactgtgaagcgaagcgtccggtgcagcgttctgatcagggcatcaaactcgcccgccgcgatcggatcgaggccggaggtcggctcgtccagaaacagcagggcgggatccaatgcgagtgcgcgggccagcgcgacccgcttggtcatgccgcccgagagctcggaaggaaacttgtcgccgtccgcgcgggagagacccaccatctccagcttggcatccgcgatctcatcgaggagccgcggcgagagatgcgcattctcgcggagcggaaattgaacattctgccgcgccgtcaaagccgagaacagcgcgccttgttggaacaggataccccagttccgctcacctttcccgtggtcgacatagtcgatttgcccgccacgtttcggcagcaggccgaccaaggctcgcatcagcactgattttccgccgcctgacgcaccgacgagacctaggatctcgccctgcctcacgtcaagattgagatggttgaggatcgtcttgctgccgaagccaaccaccagattgcggatatggatagccgtcgagcccatgctacatcccaatcgaggcgaagaagacggcgaacagtccgtcgagcacgatgaccaggaagatcgatttcacgaccgacgcagtcgtctgctgtcccaacgactctgcgctgcctttgacactcagtccctccaccgcggcgacaagtccgatcacgagcgccatgaatggcgccttgatgataccgacttcaaaatgcgtgatggagaccgcgtcatgcaggcgcgcgatgaagattgccggactcatgccaccatagagccaggcgattagcccgccgccatagagcgcggcgagcgatccgagaaaggcaaggatcggcagcgccaccacgagcgccagcacccgcggcaagatcagcaccgcgaccggatcgagccccatggtactgagcgcgtcgatctcctcgcgcatcttcatggcaccgatctcggccgtataggcactgcccgatcgtccagccaccatgatggcgacgatcagcacgccgatctcgcgcagcacaaggatgccgaccatgtcgacgacataggactcggcgccgaagcgacggaaatggaagatcccctgctgagcgatgatggccccgatcaagaaggtaatcagcgccatgatcggcaccgcttgccagcccacccggccgagctgatagaaggtcgacgtcagccgaaacgaccgcggatgcctgagcaccgcgaacagcgctgcgctgaaagcgccgagcatatgcaggaaggccccggaatcggataccagccgcctgctgccacgaccgacctggtcgagtttctccagcagggggtttatggatttgcgttcaccgcgctcggcacggttcagcccccgcacttcttccaacaaatcgccatacgggccgtccacgccggtcagcgccgctctggttggaccgccacgggccaatctttcaagcagccaggccccgacggtgtcgagcgtagtgacgcagcgtagatcgatcgctccgatatccgcgtccgccgcgcgctcgcatagccgttccaacacctcgacgttcgcaacgttccacgccccgcctgccgcaagcacgcgcggatcgtcctcattcgctttcaggaccggagagttgagcaataggccgactccaacttggaaagccaagtataggaagccgaggtcggcagtgtttgacccaacgcaactggttcacggcttggagctgttcttgacgaaaatcaaccgcttggcgagccagaagattacgttctggcggattggcccggcagcaagggcccgttagggagatttcaatgaaccgtccagccttcaggcctctgcagaatacagcgttgccgcactcgttcagggtgatccgcctcggacgcgctcgcgaacatgaccaccccgagggcgcacctgcgatcggctatatcattgttgctccgctagacgcagcgtcgcggatcgatgtcgaaacctggaagacccatcgcgaggcctgccgcgtcgttcgccagcggcccgccgaggacgatcagctcggccacctcgtacatggtccgggcggcagctggcgtttccattatgacgtggccggcacggccgccgacgaggccgggcatcatttcggggacgagcgcttcacgctcggcgaatatgtctctgtccgcgaagcggacggcatgcatccctatcgcgtcgtcgccgtcacaccgctttgatcggttccggtctgatcaggatgtcggtccctacggcatccgccaccggaagggaaaggtcgaggacgacattgacgacccggtggtcggtcggttctttcgtggcggtgaatccgagctcatgacacatgctcagcatggttgtgttctcgatcaacacctcgccggacaggcgtttcagtccctccgacctcgcgtagcggatcaggagctgcatcaacgcccatccaaggccttttcccttgaggtcggactgtagcaggatggcgtactccgcggtctggtagagtgaatccgagtgaagctggactgcacccaggatctcgccggtctgcggatccagcgcgacgaaggccatcgcgcgggcatagtcgagctgggtcaggcgcgcgatgaacgagtgagagaactgcttcaccgcgtggaagaagcgcagcctgaggtcctcgatggtcacgcgtttgaagaaggcctcgaccatgggctcgtcttccggccgcatcggccggaccgcgacccggaaaccatctcgcaagctgagctgaccttcccattgcgatgggtagggccgcacggcgagccgggtctgaccggcaaacagccgcgccggcttgcggaccgccacgcgcgcgtcgagcgccagcacgccggtttcgtccgccaacagcggattgatgtcgagctcggcgatttcgggaatatcggccgccatctgcgccagcttgacgagcgtaagcggcacgacgtcggcaggaactgccggcacatcgcggtaggctgcaagcaatcgcgagacccgcgtgcgcccgaccaggtcacgggccagattcatgtcgagcggcggcagcgccagcgccttgtcgttgatcacctcgaccgccgtcccgccgcgaccgaacacgatcaccgggccgaaggtcggatcatcggcaattccgacgatcagttcccgagcagcacgccgcacgatcatcggctggatcgtcaccccctgcaggcaggcatccgggcgagcgctccgggcgcgcgccaacaccgtcctcgctgcctcggcgacgctttcgcgggtccgcagaccgaggatgaccccgccgacatccgacttgtgcgtgatgtcgcgcgagaacagcttgacggcgaccgcgagccccttggtcaggaacggcccagccttgtctgcggcatcgtcggcgtcgcgggcggcgaccgtcggaacaaccgggatgccataggcctcgaacagcgcgacgatctcgaccggatcgagccactggcgctcctccgatagcacctgcgcgatcacgcgccgcgccgccgtaatctcgggcgtaaacgtcgaggcgatgcttggcggagtggcggaaagcgcgagcgacgcctcgcgataccgtaccaggtacataaaggcgcgcaccgcgtcgtcctcagtcggaaaatgcgggatgccggcggcctcgaaggtcgcactcgtgcgttcgtcagtgcccgcccacgctgcaagcaccagcggagctaccacactccttttggcgcggaagtcgccgacacgccgtgccacggcttcggcgatgccctcagccggcgccacggccgtttccacattcataaccagaacagcgtcgctattggcgtcctcgagcagggcgtcaagtgcggatatgtaacgtgcagcatccgcatcgccggaaatgtcgacgggattgccatgcgaccaattgggcggcagaaccttgtcgagcgacgcgaccgtatcggcggacaagttggcggccgcaccgcccaattccgcgagccggtcgatcgcaaggacgccgatcccgccgccattggtcagaagcgcgaggcggttgccgcgcgggacaaagccgcggccgaggagctcggcacaatcgaacaactgacgcaagtcgtacacgcgaagcatgccggcgcgacgaaaggcggcgtcatagacagcatccgatccggccagcgcgccggtgtgggtggccgccgccttggcacccaccgccattcgccccgatttgacgacgatcaccggcttcagtcgcgcagcggcgcgcgccgccgacatgaacttgcgggcatccgtgacgctctcgatgtagagcaggattgcgttggtatggtcgtcctgcgcgaaatagtcgagcaagtcggcaacgtcgacatcgagctggtcgccgaccgatacgatgcccgaaaagccaagccgccgttcggccgcccactcgatcatcgccgccgcaatagcgccggattgcgagatcagcgccacgcgtccatcggatgggcggtgcgcagcaaagctcgcattgagattggcgcggggtatcatcacgccgatgcaattgggtccgatcagacgtatcccgtgcatgcgcgcggtccgcgcggccgtctcggcaagcgagcccgcgccgtggccgagaccggccgacaggatcaccgcgccggcaacgccaaccgcggcggcatccgcgatgatcccggggatcgcaacagcaggcgccgtgatgacgacaagatccggaacgaacgggagcgacttcaggtttggaacggtctccgcgccgtcgaccacggcgtaatttggattgaccaccgcgattcggccggcgaagccactcgccttgaggttcatcagaacagccaagccaagtgacgatggacgcgaactgccaccaaccaccgcgacagtccgaggcgagaaaacccgctctagaccaaacgtagacatcggacagtctcgcagggaacgagcggaggcgtctgccgcttcgtgcagcgcgccagggctcgcatgacatcctcgcgagcaataatgccgagcaggtggtgatacttgtcaatcacgggaagacttttgagccgatgggtcaccatcagctgcagaacgcgctggaggttggtgtccggttggactgaaatcacgtcgcacgacatgatctcgtcgaccgtggttcccatacgatcgtcgtaatgcggcagtatgtgatcagtcgtgcaggtgaacacctttagcgcatcgagcttggtgacgaacccgaccacggtatcgtcacgcaagacggggtaggcatcatgatcttcctttgcgaacagccgatacaggtcacccacggtcatttcgggagcgacgcttcgcactgacctcgtcatgttgttcgcaacggtctcctgcaggaattcgtacatggttgatcccttcgggtgggcggctgtccgtgggcgcttggcggccagacgaacagcgcgtccgcgataccgggcgaacctaatcaggaacggccgatcggcgttgaccaggatcaaaacagggctgatgtcacgtgatcaaagagaggttacgaacctcagagaatcccgtcatgcacgcgatgaccctgcccgcacgcggcgcaaggctgcagtatgtggaacggccggatcctgttcccggccccggcgaagtgcgcgtcaggatcagcgcttgtggcgtttgccgcaccgaccttcatgtggtcgatggggaactgccaaacatcatctatccgatcgttcccggccacgaggtggtcggtcgcatcgatgccttgggtcgcggcgtaagcgccgggcttctcggtgcgcgcgtcggcgttccctggctcggctcaacctgcgggcactgtccatactgccgggagggcaaggaaaatctctgcgacaatcccgttttcaccggatacacgcgggacggcggctttgccacccacctggtagcggacgcgcgctactgctttccactcggcgagcacggcgaggatgtcgaactggcgcccctgctgtgcgcaggcctgatcggctggcgctcgcttgtgatggccggtcacggccgcaagctcggcatttacggcttcggcgcggcgggacacatcgcagcgcagatggctcgctggcaaggacgggatgtctacgccttcactcgcccaggtgacgtcgaggctcaacgtttggcattgtcgctcggcgcatgctgggctggagcctccgaggacaggccgcccgccgagcttgacgccgcaatcatctacgcgccggccgggcctcttgtcccgcttgccctgcgcgcattgcgtaagggcggacgcgtggtctgtgccggcatccacatgtcggacattccaagctttccctacaacattctctggggcgagcgacagctcgtgtcggtcgccaatctcacgcgacaggacggcaatgattttctcaagagtgcagcgaaggccggcgttcgaacacgtgtcacggttttcccgctcgatcaggcgaacgaagcgctctctcgcctgcgtgacggcaggcttgtcggcgcagccgttctgaagccatgacgacgccggcgtcatcaaccgacgcgagcgcgggtgacgtcagccagaccgccgtgttgtcgttcctggctggaggtcggccgaacttggccgtacaacggatcgacacccattgttcgatcattttcctcgagccatcgcgcgccttgaaagtcaagcgcgcggtcaagctcccatatctggacttctcgacattggagaagcgccgtcgtgcttgtgaagatgagatcaccgtcaacaagcgccatgcgccttcaatctatcgtggggtggtcccgatcacgcgtgaacgcgacggcttggcgatcggaggcgtcggccccgtcgttgagtgggccgttgaaatggttcgcttcgacgaaagcgagactctcgaccgccttgcatcgggcgtccttgaaccagaacttggcgacgatttggccgccgtcctgctcgattctcatcgggttgctgtcatcagcgagggatcgaactggcttgcctcgctacccgtgatcgtaggtcgcaacacggaacagtttcgcagcataccagaccttgcccgcgaccggatcgacaaactgcaccagttgagccatcgcgaaatagcacgaaatcgcgagctcctgcgtgcccgcgctgcgtcggggcaggtgcggcactgccacggcgacgcacacctcggcaacatcgtcatgattgacggcaagccggtcctgttcgacgcgatcgaatttgatcctgatatcgcgacaacggatgtgctgtacgatttcgcgttccctctgatggatctgttggcgtttggaagcgatgccgtcgccaacagactattcaacagctacatgcaggccgcctgggccgaacagtcggctgcgctctgcctgctgccgctgtttctctctgttcgcgcggcaattcgcgccaacgtgctgttcactaaacagcggcaacatccgcacgatcgaacgatcgccacgattgcgaacagatacttcgacctcgcactgcggctgatcacccccgagcaccccatccttcttgcgatcggcggaaaatcaggtactggcaaaagtgtgctggcccgtgacatcgctcccttgatcggaccgccacccggcgcgctgatcctgcgatcagacgtcattcgcaagcgacttcataacatgagcgagcacacggccctgcccgcagcggcgtataccctgaaggcttccgatcgcgtctatcaggcaatgctggagcaagccgcgcgaaccctggcccagggggtctcggtgacactcgatgcggcattcctgagattgaccgagcgcgatgccgcagaggtcatcgcccggagcgcccgagttgaatttcgcggcatcttcctgaccgcagatcgcgcaatgcggctgcatcgcgtggcatcgcggcgacacgacgcgtcggatgcgaccgccgacgtggtccggcttcaggagaacatcgagaccggaacgattggttggagcgtcgtagacgcgtccggcacaccggcgatcacgcttgaacgcagcacatcttgtctgcgaacggcttcgcaggcggtagatcaccttaagggaaactcctgaattggttgatgctgtcgggtctggcaccatccctccgccaacaggaggacctccatgaaacgccgattgagctttatcttcgtcggtagcgcgatcctcgcggtcgcactcgctttgttctgcaactggtacttcccggacgtggtgccgcttgccacgaccgagccggcgccccatggctggcggcttgacgcggcttttgccgtatccacggtcaggtggaccgcggcatttgtcgctgcgtcatgtgcagtagcactgatgttaatgaacgtcaccaagcgcccaaacaagctcgagggacgctagacgattcctttcgaagcgttctcggcattcgcaatcgactctccgaaggccggcttagagccggccttcggccgttggatcgtcgcgaaagctactcgtgcaatgcgaggcctccatccgccgtccgccatggtgaacggcgcatcagccaggcctcccgaagccgtgggttgtcaggcttgtcgccgccacaggctccagagactgccgacgagcaagaccccggtcacgagcaagataaccacgaacatttgcatgatgtcgaacttcagggagtcacgagcgacaaacaacgcggtgatgaatcccgctatggcaaggaagatacgaaggatcaggctcatgacttcctcctggagccgcaagggcctggcgccgacaaccatgacgctgcaagcccatctcgtaataccgtagtggttctcgccagcgagcaattgcgacggatcaactccgcccgcggcgcaccttgccggatcaatgctccagaacatactgcccaggtgcatcctcgagcggcggtccaccctcgggcgtatgaagcgacggctgcgccgctacccaggcatctgaatgcgccgtgaggaagcgaacccactccagccaccaggatccctcgcgatgcggcgccttctgcagccactcgtcgggtccgacatagggttgatccttcttcttctccagcacctgataggtgtgaccgtcctccgaaggcggggccactatgccggcattgtgaccgccgctcgccagcgcgaacgtaatatcggcctcagcgagcagatggatcttgtgtaccgaccgccacggcgccacatggtcacgcattgtgccgacgacgaacatcggaacacggaggtcggacagcgcgaccggctgcccgtccaccacgtaccggccctcggcgaggtcattgtcgagaaacagcttgcgcagataatccgcatgcatccggtaaggcatccgcgtggcgtcggcattccacgacatcagatcgcttggagcgtcccgttggccgatcagatagtcgcgcaccagacgcgaccagatcaagtcgttcgatcgtagcagctggaacgcaccggccatctgcggcgcatcgagcacgccgcgccgccacatcatatcttcgagaaacgcaacctggctctcgttgatgaacagggtcagctcacccgcctcggtgaaatcgacctgggccgccagcagcgtcaccgatcgcaggcaaccgggccgctccttctgcagacgggccgcggcgatcgcgagcaatgtaccgccgaggcagtagcccgtggcgtggatcgcgcgtccgggagcgatctgattgatcgcgtcgattgcggcttcgaccccgagcctgcgataatgatcgaggccaagatcacggtcggccggccccgggttgcgccatgagatcgcaaacacagtgaagccgcgttcaaccaggaagcggatcagggaattctgcggggagagatcgagaatgtaatatttcatgatccaggccggtatgatcagcaacggctccgggcagacatccgcggtcacgggcgcgtattggatcagctcgatcagctcgttgcggtagacgaccttaccctcggtcgccgcaacgtccttgccgaccacgaaccgggcaggctcggatgactggcttccgaaccgctttctgcaatcatccagccaattgtgccagcccgaaacgaagttgccgccgcccgaatccatcatctggcgcagaacttcggggttgctgagcgcgaagttggacggagctgcggcgtcgaggcattgtcggatcacgaaatccacgatcgcggcatttcccttcgaaacgccatgcaatccgcttgccgccgaatgccaccactgctcgccgagcagaaacgcctgggccacgatattgaaggccggcaacgtccaatccgcgcctgagaatcggtggtcgctaggttgcggcttgaccatgaaccagggctgccaggcagcatgcggcgtcaataccatgcgcgcgaaacgtgaaccgtcgcccaatgccttcagggcaagctcaagccgcttgccgggcgacgcggcgagatgcagctgccaatcggcgaaggcaagcgcaaggcccgcgggtgagagcccgccggtccactgcgcaatcgccgcgtggaccagatggtccatcgattcggcgccgctcaatgcctcccgttcagacggcacaggagcaggcgctccggccgcaaccgaatcgtcattggcaggggacgctgcttggtcgagaattgcattgactgtcaccgctcgcctccttgcccgcgcccgacgagcacgagcctcatgctgctcggcaccaaatgccgcccgctcagtcgagctggaaccgctgccgacccaaggccacgatctcacgatcggtcggatgatcgctcgcctcgacatgcagattgagatcgggccgttccgctttcagatagtgcaccaactccgtcttctcgatgcccgggccgatgaccagcagatcggtgcaactgcttaaggcttctccgaccctggcgagaaaggtcgggtcgccctggacgcgaccgtcgccgatcgtattcgccttgtggtgaagatgctgggacggcaagtgagcatggacggcggccgcgctgacacccgtcagcccaacaccgaatatcttcgccacgaaatgatcgatccagacgaccgcgcgtgcatgcggttgaaccgtgatctcgctcatgaatgatctccagtgcctgctttttctgcattctctctcaatcgcaatgccagagccgcaagcagctccctgcggctgacgataccgacgacagctccggcgcagatcaccggaacctgtgacacgtcgtaaacatccatctgcgcgacaacgtcaccgatcgaggcctctacatcgacggtgatcggtgcagaactcatgagcgtcgcgacacgcaacgagcgcatacgttcgcgttccggcgtgttctccgcgattcccagcagcgattccaaccagtttccgaacggtgggttgacgccgagctcgtcgcggtgaaggaaatcgccctccgaaatcatgccgacgagatcgccgtcatcgttgatgaccggcagcccgcgctgatcggtttcgagcaacagctggacggcatcgagcacgttggcagtcggcttgatcgtcgcgaacgaactgcgcatcacatcggttgcaagcattgtcgctcctcccattcagctcatatgctggccgccattgatcgacagcgtcgatccggtgatgaaacccgcctcatctgcggcaagaaagatcacggctcgggcgatctcctccggctcgcccagccgcccgaccgggatctgcggaaggatcgcgctctgcatgacgtccgtcggcacggcagccagcatctcggtgttgatgtagcccgggcagatcgcgttgacggtaatccccgaccgcgcactttcgagggcgagagcacgggtgaagccgagctcggcggctttcgccgcggcataattcgtctgcccgatctggcccttctgtccgttgatggacgaaatgttgatgatccgcccgaacttgcgagcccgcatgccctcgatgagcggcctgcacatattgaacaacgaatcgagatcggtgcggatcaccgcgtcccattgcggcttggtcattcgatgcagcgtggcgtcgcgcacgataccggcgttgttgaccaggatgtcgatcggcccaaccgccgcttccaccttgcggacaccggccgcgcaggcttcgaagttcgcgacatcccactggaagacgccgattccggtctggtcgtgaaaccggcgcgcggcctcggtattccctgcatagctggccgccacctgataccccgccccggcgagagcccgcgaaatcgcggcgccgattccccgacttccgcccgttaccaatgcgacgcgtgccatgcctgcttctccaatctctcggcaggacaaatgggcgaaattcgcatcccgcggattgatctcgctcaaacgacgacaactcgcatgtatgaggcagatcaaattgtgctacgcgggcctgtgctttgatgggtttgtctcttccacgcttcaggagaacgacccatgttcaggaacatcctggtccacattcccacggaactgtcgccgcgtcccgcggtcgacggatcggtttcgcttgcgctcagtacgggcgcgcatctcgatgcagttgcgatcggatacgagaccgccaacgtcccgttcgtcatcgaaggcggtgtggccgtcgcctccctcttcgaggtggagcatgcccaggcgctcgaacgcgccgaggcagcgctgcgcgtcttcgacatagaggcccggaatgccggaatttcatacacgacacgcgccgcggctgccgttccgatcgatgctcgcgagatcgtctgtgcgagcgcgcgactacatgacctgactgtggtagcccagccgcagcatcagcacgacagctacgacaacgtcatcccgcgggagctcctgtttgaagccggagggcccgtcctgttcatgccctacacattccacggcgcattctccgccaagcgcatcggaatctgctgggatggcagccggcttgccgcccgggcgttgcatgacgcgatgccgctgctgcacaaggctgacgccctcaccatcgtcaccatcgacggtccagacccgatgcccgcggagagttccacgaaccatctggtgcgatacctcgccaaggcaagtctcccggccaaggtcacgtcgctgcccgcatcccgaaccgaaatccagtcggtcctgctgtcgatcgcggcagatgagagcctcgaccttctggtgatgggtggatacggccactcccggctgcaggagagcctgctcggcggtgtgacgcgcgacatgcttcgcgcgatgaccattccggtcctgatgtcccattgaacgcgagtcggccccgtgagacatcgtgccaggacactgctccatttcgtcggtagcggcgtcgtcgccatcagcacgatctgcgccctgccggctccggccgtagccgatcaggcgcagggtcggcgccttgctcagctctactgcgcccggtgccacgcaatcgaccgggtcagcccaagcccgctgaagattgcgccgccgttccgaaccctgcacgagcgatatccggtcgagatgctgcaggaagcgctggcggagggaatcgtgaccgggcatccgaccatgcccgagttcagcttcgaaccggaccaagtcaacgacttcatcctgttcctgaaatcgctggagtccggtgcggccaaccgttgaggcaggtcaacatgacctgcgagcaaaggtcttagaattcaactttcaacctggaggtccacatgcgcgcgcatcaggtcatgaccaagcatatcatcgcggtcagcccgcatacgaagatcatagatgctgccaacatcatgctgcgatgccacctcagcggcctgccggtcatggacgaagatggcacgctcaaggggatggtgtcggagggagatttcctgcggcgtgtcgagatcggaacaggtcacaagcgatcgacctggctggaactgttcacgggcgtcggtggcgccgcgaccgatttcgtgcacgagcgcggccgcaaggtcgaggacgtcatgaccacgaacccgatcaccgtcgaagagcagacgccgctcgatgagatcgtccacctgatgcacaagcatggcgtgaagcgggtgccggttgtgaacggaaagaccatggtcggaatcgtcacccgggcagacatcttgcaggcggtcgcgtcgctggcccgcgaggttccggacccaacggccgatgatgctcacatccgtgaacggatcctgcgcgagatcaacgcgaccggctggcgaccggccggcttccaggtctgggtccgcaacggcgccgtacacctgcatggcctgatcttcgacgagcgtgcccgccaggccgcgatcgtgctcgcggaaaacacctcgggcgtcaaggaagttcacgatcatctctgcttcgtcgacggctactccggctactacgtcgaatcgccggaggacatcaaggcggccagctgatcggatctgaggagactaacatggccatggatacgctgttggtcgtctcggtcgtcggcctcgtcttctcgtcttttgcgctagtgctcgccttggccgatcacagcacgacgcgctggcagcgtctggagaaggacgaggatcgatccagcatacgcgcctcttttcctggcaagcacatcgcctgatccgtcccaacaagcgcgccgcaggactgacgtcgagcggcgcgcgggatcttgcttgcttccaatggtcaggccctacgtacaaatacgtaagtggtttctacttaggtgaaacatccaaatttccccgcctgttggatgcggtcaatgtggctccatcgatcttcccaatggagcgtcgccgtgcagacccagaccgccgtttcttccgatatcagccgccacccgagcaacatccttgaccggcggtcacgtgccgaagggccgttcgggatgatcgggacaccgatgcggtttacccgcaatagcgagatctacggcgaggacgaggccgcggaatatctttatcaggtcgtttccggcgccgtccggacctacaagattcttgacgacggacgtcgccagatcggcgcgttctatctgcccggtgatatcttcggcttcgaggccggcgaaacccatatctcctcggccgaggcgatctgcgagacgcgggtcatcgtggtcaagcgctccgcgctcatggtccgtgccgaccacgaaaaggatctggcacgccagctttgggacgcgacggcccaggaattgcgccggtttcaggagcacctgatgctcctgatctgcagtgccgaggagcgggtcgtggggttcctgcacgagatggcgcgccgcactgtcaagaatgccgccatcgagcttccgatgtcgcggcaggacattgccgactatctaggtctgacgatcgaaacggtatcgcgcacctttacgcaactcgagcagaacggcgcaatttcccttccgacctcgcgccgggtcgaactgcgcaggcgcgcgacctgcaatcggatattggtgggctaagggtgtcgcaggccgtcccggcgggactcggagcgacacgcccggctcaagcgctgacgcctcgtggcttggaacgccgcgcggcggttcagatttgatctcgcgcaagcagcaagacggccttcggctctatcctggatacttcctccgaggagaggcgccgccgtgatcatcgatcttctgcgccgtgaacaccgcaacattgatctgctcctcaccgtcctcgagcgtgaactggcgctttttgagcgcgggcatcgccccaattatgaggttattcgggcgatcatcagctatttcgaagtctaccccgaggtataccatcatccccaggaagacctgatcttctccaagctaaggcttcgcgatccggatgcggccgcaaaggtcggtgatctcgcacgtgagcacacggatggggccgaccgcttgcatcgcttcgcccgggcaatcgacagcgtgcttgcaggtcgtgagattcctcgacaggaggtcggcaacatcgtgcgagattttatcgtgcgcgagcggcagcacatgatgatggaggagcgcgatttcttccccgcagccgtaaaggctctattgccgcaggattgggaggaggttagctcggccctgaccgatcatagcgatccgctcttcagtgacgccgccgaagagaccttcgctaccttgcgggcgcatattctgcgattggagctggaagcagaagctgaacgagaccgagttaagggataatccgcgatagcggcgggcggtaaggtggactacgcgcggcgccccgatcgcgggttgatccgaatcaagctcgaccatccacccgaatgcgatcctagcgtggcttggtgcatggtgacgacagatggaccgatcgcggcaacgaaacggaccgacgttcgacaagatgggcggcaccggtgctcccgccatgacgatcgcatcatcgatgcagaccctcgaacatcccgcgccgcgcccacgccaccgagacggcccaaccgtctcctggtacggccgcctgctgattgtcagcacgttgctgctggcagccggctgggagatactccgactgcttctgaccatcgtcacgctggactgaagtccgtcgatcggattttgcctcagcaggacattgtgctgtcgtcttgagacagctctgtcgaatggtgcctgttcgcgtcccatttccggaaatacagcgcgtccgctcctgggatgctcacgcaatgatatctctttgcaaactccgcgacggcggcagcagccacctcgttgattccaaacaaccgttcataatcggactcggagatcctcagaatggcgcccgcgccgaggcggttgagccgtgatcgcaactcggcaagagtaaggtctacgcccatcagcgccgccgcatcttcagactgcgctggacttctgaagggtgcctatgcccaacaatgtatagagcgggcggtacgagaagaatgacgtagcagtcaggacgagcgcgagggacccggcgaccagccaacctgccccaagcgcgccgtccttcacgatataggcgatcaaagccaaaccgatgatgatccggaaatactgatcaatgcgtccgacattaggtgtcatggcaatgtgcctcctcgttccggccgcatactgaacacgctccaacgcgctgccttgatcatggtcaattgcacagtgcggccgtcacaaccatcgagatcgatctggcgtcgtcgatgtgtcggcacctgcgtggaccgcaccgttcatatgacgatctcatgaatgatctagcgcaaggatatccggctcgtgcctgcctagaatgcgccaccatgaaagcaacaatcgtcagagaactcggacagcccgacattctgttgccgtcgctggttgcggaagggctggccgcgaacgatcgcatcaagctccgcttgagtgcccttcaggctgccgttcagcatgccagggctccacatcgcgccgtcgccgatctcacgatcgaaagccgggcagcgggacttgcgccagccatgctggcaacgctgatcggcggcgctcatctggcagggggcagcaagattgtcgctcccggcctcgcgccgttgctcaagagcatcgaaggcgacgcagaaaccatgatccgcgcggtcaccgccggtgatccgaccgagggcgagaagttcaggatacggctcggcaccattcgagcggccggtcatctcgaagcgtcgaccgaaatcgaaattgcccgcatcgggcgccttaccggcgtcacgcaggacgacgcggacggccttcatcggctcgtcatggacctgcataaggccctgaaccagctcgccgcaagtcgctccgaggagatcgtagcgggcgcccgtgtcttcgggctccagaaggaggatcgtgcaccggtcgaaagcttcatgcgcggcgtcaatgagacccgtgccctgaagttcaaccaccccggcctcgaggccacagcggtccgctcgggcgatcgccttgtgatccagaatgacatcggcaccactgacgcacatgttgtcgtcatcgcgatcaggggcaatgcggtgacggtcacctacaccgacgtgcaccggtcgcgcgccaagttcttcgtgtcgctgttcgacgggttttcgctcaaatggagcggtctggaccggcactccgccgcaggtctggaggaggagagcgcgttcttcctggtcaccgggctgcttgaagcaccctctgcagcggatcgcgacgccttcctgacagcgattggcgggtcgctggtcttcttgatcgactggaacaaggcgcgaaagctgctgcgcaactgggtctcgagggatgatgctgcccgcatactcgaatgggccgcccggcacaggatcggccaccgcgcgttcctggagctcggcggcggtgagctgctcggcgccgccgtacgcaacgcggccccagcccggataggcttcggcgagcgactggaccaggtgctcggtcgagatgcggcgatcgacctgctgaaggcgacgttgcgggtttcggccgacgtgctgctcgccgggcaatccttcagactggcgcgcgaccgtgtcggcgcggaagtcgtccagcatctcgagcgtgtcgaccgcacgctgctcgcggtggtgctgcgccagatcggattggcccaggaccttgccgtcgccgtgtcgcgccacatcggcgatacgaaggccgatacgcacgccggaaagcagcttgctctccgggccggtcgaattgaacagaaggccgaccggattgcgattgaggcgcgcggagagatcgcgcgcctcaatgcccggccactcattggcgagctggtcgattgcgtcgagcaagccatcgacgagctcgagcaggctgcctttcatcgcctcgctgacacgggaagccgccgacaccgcgctgcaatcggcgctggtcgcgctgtcgtcgatctcggtgactgcgaccgaggtggcggcgtccggacttgccgcagcagcggaggtgcaggaaggccggcgcgccgattccgatgatgcgcttgctgcagtggcccgcctgatcgacgccgagcatgcggccgatgcccaggagcgtgacattaccgcgcgcgtccttgccggcggtctcgacgtggccgcgtcgcttgccgcactggagttggcccgcgccatcgaacgatccaccgatcggctcgcgagcttcgcacacatcctgcggcgctacacgatgaatgatctctcgatctgaggacgaactgccatgaagatcgtaagaattggcggtcaatcgcgtgagctgccgtctgcggaagaagtcggcgcgaaggcgacaaacctcgcacgtatggcggcgctcggcctgccggtcccacccgccttcgtgctacccgtcaggctttgcgcggacgtcgttgccggcaaggcccatgcgacccgcaatctgcgcgacggattggcggaaggcatcgctttcctcgagcaggcgaccggaaagtcgttcggagattcccgcaagccattgctggtctcggtgcgatccggggccgcacggtcgatgccgggcatgctggacaccgtgctgaacgtcggctgcacatcgacagccgtgcgcggcttgatccgtgggaccggtcggcctcaccttgcgtgggattgccgccgacgcttcttggagtgctatgccgaaacggtggcagggctcgaccctgctccgttcgaggcccggctgaacgaattgatcgccgcggagggcgtcgagagcgaccgcgatctcgacagcgaagcgctggagcgactggcgtctgatgaacgaaaggtgctggaagacgacgatgatggctggctcgaggatgccggcactcagctcgagcgttcggcccgcgccgtctatcgctcatggatgagcgagcgggcgcagacctaccgccagctcgaacgactggggcacctccatggaaccgccgttaccgtgcaggcgatggtattcggcaatggcagtccgtcgtcgggtgccggcgtggcattctcgcgcgatccttcgaccggcgcgccagcagccgtgatcgatgtgctgtttgacgcccagggcgaggacgtcgtgtcgggccgtcgtacccccgatacggaggctgcactggctcgcgtgcttcccgccatcgcggacgaacttcgttccatcctgaaacggctggaacaggagttccgtgaggtgcaggacgtcgaattcaccatcgagaacggtaaactgtggatccttcagacccgctcggccaagcggacgccccgcgcggcgttgcgaatcgcgattgatctcgtgcacgagggactgatcacccgcgaacaggcgcgggagacgatcgcaggcatcgatctcgctacgctcgtcgaaacatcgctgcttccagcacaacccgccatcacggcggggatcggtgcttccggcggaattgccgttggacgagcgaccttcgactccggtacggcacaacgcctcgctgccaccggcgatcccgtcatcttgatgcggcccgacaccagcaccgccgatattgccggcttcgctgccgcggccggcatcgtgacggcggctggcggccgcaccgcgcatgcctcgctggttgcacgccagatgggcaagccgtgcctggtcgggtgccgtgagcttcgcatcgacaccggcgcccagcgcgcgcagatcggacaagccgtcattgcagcaggcgactgggtcacggttgatgccaacgagggctgcgtttatctgggccgcggcgacatcgtcacgcgccggcccgaagctgaactggccgaggtttcaggctggcaacagccgcacgcgctgaagcaagatgcgacctcgtgagaacgcgagcgcacaacgttttgagtcggcacacgcgggcgcggcgcatcatgccgccgccagatcaggcctgcggcggtgccccgattcgtccgttatcagcgcctactccgctcctcgccccacgctgcgagcggacgccgccaacgcctcatatccggccgcgatcttcatgaagtgctcgcgagtggcctgatcctgatatcgtcccgcctgacgcctcgtccgctcggcgcgggactcccagtaggccgcgtcgtcctgcggccctctgacgggcggtttcctttgcactgccccggcggcctcctccgccggtttgcccgacggctgtgggtccgcagcagcctcgcgcccgcatcgcttcgaccgacgccgcttcgtatgttccgagcgcttcacgacaacctccgaattgatagctatcccgcagcagcacgggcccacaagccatgcagatcagtccatcgccggctcggagaccacagcgcgttgctggaattggtcgtatgcctccagcgcgtcggcggcatacatcaaggaaggtccaccgcccatgtagatggccatgccaagggcctccgcgaccgcccggcgatcaacgccgagcttgaccagcgcctcaacatggaaaccgatacagccgtcgcagcgggcggcgacgccgagagcaagcgcgatcaattccttggtcctggtgtccagggcaccgcttttcgttgccgcctgcgctagggccgagaaagctcgcatggcctcaggaatatcgcggcgcagatcgccgagattgccggaaatatgcttgcagatgttggaatagtcttttctcatatcaatcccagtcttcggcattagggttagccaagaaagggcggacctgctgacgggcgattcgtcaaggaccgcgcttcgtccaacgcagcccagggacacgatccagcctgaaggacatgcgtgttcggcctgcaaggatgcgcatcatctgacgcgcactttcgctgccgttcattgcgccagatcaagccaggcggactttctcggcttgcatcggaccacggctgcgcacagcgccgcatcgacgacgccatgaaactcgaccagcatgtcgtcgccagtggtcttccagcatgtcgtcgccagtggtcttgatgaggcggctgaagccgaccatgtcggcggcgaggatcgcagcgagccggcgtactggtcctggcacgtccatccgaacgatctgcccggttgcctcactggcacccagcaaatcccacgacgtcgcccgagccgccgcagcggctccgctggagccatcgggagtaccttggcggggcggcctgacggcgtcaggccgccccgccggccgcctcagagcatcccgagcgcctgcatataggtctccaggatggtctcctgctcctggcgctcgttggcatcctgcttgcgcagacgcacgatggtccgcagcgccttgacgtcgaagccgttgcccttggcctcggcgtagacgtcgcggatgtcgtccgaaatggtcttcttttcctcttccagccgctcgatgcgctcgatgatggacctgagctggtccttggcaaatcgcgttgcgggctcttcctgaacggcggcagacgtggtggccatcgcgtactcctgaaatggcaatgaaatgtcgcgcgaatacgcgccacgcgcaccgcttgctgcgggcgaccctcgattttggagccggctccgtcaaggaaacatcgcgctcatccacagcgcgcccacaagagatgcgagcgccgatggaactgacgtcacacagatcgggaattagtgcccgctttgggccttcttcatcgccgcgagctggtccggcgtcgcgctgccctgatacttcgccttccactcctcatagggcatgccgtagaccgcctcacggctctcgtccttgctcaccgcaaggcccttggcgtcggcctcttccttcatccagttggacaggcaattgcggcagaagccggcaaggttcatcaggtcgatgttctgcacgtcggtccggttgcgcagatgactgacgagacgccgaaacaccgcagcctcaagttccgttctcgttttgtcgtcaatgctcatgatcgtgatcccggtgtgtgacgctcaccatattgatatcaggtgggaattgtcacagattttgccacatcgacgcgcaatacggacctgtccggccacacttgccgcgatcccacagcgcgggagacgggcacccgcccgttgacagtgcctgccgggcacgcgaaatcctcaatgatttgatatagcttcgccgcatgagcccaacagattctctcgcctcagctccccgcatcatccgcctgatcatggccggtctcccgccggtgctggggcttgtcgcggcctgcctgtggacgagcccggcggccgccgatttccggctctgcaacaacacctcaagccgcgtcgggatcgcgctcggctacaaggatgccgagggctggaccaccgaaggctggtggaacgtatcgtcgcggacctgcgagaccttgctccgcggcaatcttgtagcgcgctactactacatctacgctctcgactacgatcgcggcggcgaatggtccggccaggccttcatgtgctcgcgcgacaaggaattcaccatcaaggggaccgagaattgcctggcgcggggctttgaccgcaccggcttcttcgaggtcgacaccggcgagcagcgtgcatggaccgtccagctgaccgaagccaacgaacaacagccgcagaaagtaccgggaatgccgggcggcgtggccccgggaagccccggggcgatgccgggcctgccaaacccgccgccgggcgcaacgccgccgggcgcgccgggtctgccgccagccgcaacgccgcccggaaacaaacaatgagacgactgcgtcgaatcaagatcctcgcaacgctcggcccggcctcctcagacagcgcgatgatccgcaagctgttcgaggcgggcgccgacgtgttccgcatcaacatgagccataccccgcatgacaagatgcgggagctggtgaagaccatccgcaacgtcgaatcgagctacggccggccgatcggcatcctggtcgacctgcaggggccgaagctgcggctcggctcgttcgcggaaggatcgacccagctcaagaacggccagagcttcatcctggattccgacaagacgccgggcgacaacagccgcgtccagcttccgcatccggaaatcctcgccgcgctccgccccggccacgcgctgctgctcgacgacggcaaggtgcggctgatcgccgaggagacctcgcccgagcgcgccgtgacgcgcgtcgtgatcggcggcaagatgtcggaccgcaaaggcgtcagcctgcccgacaccgatcttcccgtgtccgcgatgacgccgaaggaccgtgccgacctcgaagctgcgctgccggagggaatcgactgggtggcgctgtccttcgtacagcgggccgaggacgtgatcgaggccaagaagatgatccgcggccgcgctgccgtgatggccaagatcgagaagcctcaggcgatcgaccggctcgccgacatcatcgatgcggcggacgcgctgatggtggcgcgcggcgatctcggcgtcgagctgccgctggaacgggtgccgagcctgcagaagcagatgatccggatggcacgccgcgccggcaggccggtggtggtcgcaacccagatgctggagtcgatgatccaggcgccggtgccgacccgcgccgaagtctccgacgtcgccaccgcggtctacgaaggcgccgacgccatcatgctgtcggcggagtccgccgccggcaaattcccggtcgaagcggtctcgaccatgaaccgcatcggcgaagaggtggagcgcgatccgacctatcgcagcgtgatcaatgcgcagcgcgtcgatcccgaggcgacggtgggcgacgccattgccgatgccgcgcggcagatcgccgagacgctcgacctgtcggcgatcatctgctggacctcctcaggttcgaccggcatccgcgtggcgcgcgagcggcccaaggtgccggtggtcgcgatcacgccgaacctcgtcaccggccgcaagctgtcggtggtgtggggcgtgcattgcgtggtcgccgaggatgcgcacgatctcgacgacatggtcgaccgcgccggctcgatcgcattccgcgacggttttgccaaggccggccagcgcgtcatcatcgtcgctggcgtgccgctccgcgcccccggcaccaccaacatgctgcgcatcgcctcggtcgggccgaacggcgacgcgcagctgtaacaggcgtcttcgcgatcagccctgcaacgatgcctcgagcgtgatcttggtgttgagcagcttcgacaccgggcatccggccttggccttgcccgccagttcctggaacgtcgcgttgtcggcgcccgggatcttggctgacagcgtcaggtgcaccgcggtgatggcaaagccgtcggcgaccttctcaagcgtcacgtcggccctggtttccatatgctcggcggtaagcttggcttcgccgaggatcagcgacagcgccatcgtgaagcaggcggcatgcgccgcgccgatcagttcttcggggttcgagccaggtttgccctcgaagcggctggcgaagccgtaggggtaatcggcgagcgcgccgctcttggtcgaaatcgcgcccttgccgtccttgatgccgccctgccatttggccgaaccatgggtcgtcgtcatgcgttgctccctgagcttggttgaaccgggccacgagcctacaacgccaatgcgacggaagtgttcgccgcgctcggacgttaagcgccgaccagcgccttcgccggcgtcgtcgcctgcaccacaagaccacgggcgcgcgcatccatcacgccgaccgcgcgcagcgcgagcagcgtcacggtctgcaccgcatcacgcagcttgatcggatcgtcgagattgcttggcgccagcgggccgaccagcgcctcgtgcagcgcgccgagcaaggcagtggcggccagcgccgtgtcctgcgccggcagatggccggcgcgcacggccgcatcgatgcgcatggcgagctcgccggaaatatcgcggcggctggcgaggcgagacgccgtgacgtcgacatcgaccggctcggcgaggatgccccaggcgagcttgcgctgcgacaatacatggaccgcaatcgtcgtcaccgcggcagcgagcgccgaggatggtccaggcgctgcgtcggcggcacgccggattgcggacagctcgtcacgcgagacttccgtgatcaattccgagatcagctcggccttggacgggaaatagcgatagacagtgccggccgcgacattggcccgcaccgcgacgggtgcgatctggaccgccgccatgccgcccgccgccgcagcatcgcgcgctgccgacaggatggcgctgcgccgggcagccagccgtttcacgacctgatgtgttcgccggtagaccatggcgttccgtcccccaccgtgtgcccgggcccggcgcccaccggcagaacacacgcgtcttcaatgttttgaacgattgatcccgcaatcgcctgaagaagtgaacaactattcagaccgaatgacaagctggaattgtaaggattttgcgacagccggatgccacctcggttgcgcggcggctgctccggcccatggacgcgtggggcggagcggaattcggtgacatctcgccagctgccggcatctcacgcgttccgatcgggccttccgatggtcaatggcgagctaacgtggtcgctcgcaatcgagacatctggtctcgcccggagccgcgagatggggcggcatttaccggaatttatcggaagccgtggtcgagtgcgccgaacgtcgcctgtggcgttgccttgatgtccccggccgagccaagaaagcgcatgtcactgtccgtcaccagcaacgcgagcagccgtagcgccgcgcgaggattagtgccgctgtgtgccgccgtgggggcctatctgttctatctgtccgcaggcgaaatcctgctgcgcgattccgacacggagtggcagatcaaggtcggacagtggatcctcgaacacggcgcgctgccgacatcggacgtgttctccttcactcgtttcggcgagccatggatctcgagctcgtggctgtcgcaggtggcgtacgccctcgtctatggcggcgattgggccggggcggtgatcctgacctcgatcgcgatcggcgcgacggttgcgatcttcctgcatctgctcagcccgtatttcgatcccgcgcgcgcattcctgatcgcggcgctggcgctggttctatcgacgatccacttcttcgcgcggccgcatgtgttggcgctgccggtgttgctggcgttcatcggtggcttgatggcgtcagcggatcgccgcacttatccatcatggtggctgctgccgctgatgacgctgtgggccaatctgcatggcggcttcgttctcggcctgacgctgatcggtccgatcggacttgaggcggtgtggagcgcggagcccggccgccgccgtcagctcgtcgtgcgatggggattgttcggcatcgccgcgctggccgcgagctgcgtgacgccctacggctggaacagcctgctcggcgcgaccaagatcctcagcctcggcaagctgctgacgctgatcggcgaatggatgcccgcggatttcagcaagccgagcttcttcgaagccaccctgctcggcctgatcggcctcatctgctatcgcgggctgaccctgtcggtgccgcggatcctgctgctgctcgggctggtctggatggcgctgagccatatccgcaacatcgaggtgttcgcgttcatcgcgccgctggtgctcgcgaagccgatgtcagaacaatgggggatggcggtcgtcaccgccgcccgcttcgaggaacgccgctccctccccgtcgtcacgatgctggctgccgtcgcgatggtgatcggggcgtgggtgacgacgacgactttcgtcgcgcagcatgagttcaaattccttccggcattctggcccgctgcggcggtcgacgtgctccagcagcacaaggcgcagcgcgtgttcaataccgcgccgttcggcggctatctggtgagccgcgacatcaaggtgttcatcgacggtcgcgccgagttgtatggcgagcaattcgtgctcgactattacgccgcgctcgacgcccgcgacaccggccagctgctggacctgctcgacagataccggatcgacgccacgctgctgagctcgggctctccggccggaaacgtgctcgaccacctcaagggctggaagcggctctacaaggacgacgtcgccgtcatccatgtgcggtcggacgacaaggccgccgcggcgccggcggccgggagctcgaactagactgatgatagaaggcgcgcgcgccatgtcattcttccgtcattgcgagctaagcgaagcaatccatcggaccgcatacgcggaacgatggattgcttcgtcgcttcgctccccgcaatgacgccgagagacgagcggcgggcctctcagttccccgtctgaagctccccgaagcgatcccaggtcttgccgttgaagcgcatcagctgcatctggtcgaccggcacatggtcgaccgaggacgtgttgaccttgatgcccggcagcagcatcggcaattccagatccctgatcgcgaacgcctgccgcagaatgttctcggtcgagagatcgtcgccgcaggccttcagcaccgcctccaacgccatcgcgctgttataagcgttgacgtagttggtgtcgtgctgatcgccttcaggcaggtatctggtcatgaagtcgcgccagcccttcatgccgggatcatccttccagaccggatcgtccggatccttcacataagccgttgagatgatgccggtgccggcttcgacgccagccggctgcatcacggtcgagatccataccgcagtgttggacaggaaagtcatcggccgccagccgatctcgaaggctttgcggatcgactgcgcggcgaatttcggcgtcgccgcgatcacaaagacgtcggcattggtggccttcagcttgacgatctgcgagtcgatcgtcgggtccgatatctcataggtcgcaacggtgacgagagaatcatacttgtcgcctagcacatccttgatacctgcaagatagtcgcggccgtaatcgtcgttctgcgagatcaccgcaaatcgcgcgttcggattcttcgccagcgcatagcgcgcgtagagccgcgcttcgtagcggaacggcgcctgcacgcccatcgtcgcctgcgggaattgcgcaatgtcgccgaacttcgaggcgccggaggccaagaacagctgcgggatgttcttgccctgcagatactttgcgatcgccgtgttgtgcgcggttccgatcgaagagaagatcagcgcgacctcgtcgctctcgacgaggcggcgcgtctgctccaccgtcttcggcggagcataggaatcgtccagcgagatgaagttgatcttgcggccgttgatgccgccgtgctcgttgagcatcctgaaatagccggcctcgcccttgcccagcgcgccgaacgcagacaccggcccgctatagggcatggtctggccgatcctgatttcggttgatgtgatgccacgcatctcagcggggaatgaaacggcaggcagcagcaggaacgaaatggcgccaagcgcgccgaatgccttgcgcatcggcctccccctcttccttgccgcgcttctcggacgacgcggccgtgccgtttgacgacttggcatgaagatgccacggcgccccaatggaggccaagcacattcgccgcggcgatctcagcgctggccgcgttccttgaccgggatcacgaatttcaggcccgaccagaccgcgtcgacggcgcagaccttgacgtcgatcaagccgctcgcaagcccggtttcgcgaaccaccacatcggtgagatcggtcgcgacgcctgagctcttcttcggccacgacacccagatcatgccgtcaggcgcgatcgcctcccggtagcgccgcagcctggccgagagccccctggcctcggcagcgaaaagatgcacggcatcgagtggcgcccgcgcggtcttcgcgatccgcaggtcggccggcagctcgccgacgatgtcgcggtaaggaacggacagcccgtcgacaaaaatgcaaaagcccggcttgaggccgagcttttgcacaatcggtttgccggacgtgccggccatggcgaggcttatgcctgcggctgcggttccatcccggtgtccggatcgggacgcggacgcggcttgccggccggcggcaccgcggacgcgcgcggaccgatcggctccaggaccgactcgcggctcggcttcttgccgttcagcaggtccttgatttcatcgccggacagcgtttcgaactccagcaacgcctttgccaaggtttcgaaatcgaccttcttctccgtcaggatacgccgcgcagtctcgtagccttcttcaaccagacgcctgacttcggcatcgatcttctgagccgtcgcttccgagatactctgctggcgtcccatcgacatgccgaggaacacctcttcctgattgtcgccataggcgacggtaccgagttggtcggagtaaccgagctgcgtgaccatggccttggccatcttggtcgcctgctggatatcgctcgacgcgccggacgtgatgttgtccttgccgaaggtaatctcctcggcgacgcgcccgcccatggcgaccgcgagctgggaggtgaactccttgtacttcatcgaataacgatcaccctcaggcaggaacttgaccatgcccatcgcacggccgcgaggaatgatcgtcgccttgtggaccggaatgccggccgggacgttgaggccgacgatcgcatgaccggcctcatgataggccgtgagcatcttctcttcctcactcatgacgagcgacttgcgctcggcacccatcatcaccttgtccttggcctcttcgaactcggcctgcgtcaccatccgcttgttgcgacgcgcggcagtcagcgccgcctcgttgacgaggttcatcaggtcggcgccggagaagcccggggtgccgcgcgcgatggtcttgaggttgatatccggtgccagcggcaccttgcggacgtgaaccttcagtatctgctcgcgaccaccgacatccgggttcggcaccacgacctgacggtcgaagcggccgggacgcagcagcgcgggatcgagcacgtcgggacggttggtcgctgcgatcaggatcacgccttcattggcctcgaagccgtccatctcgaccagcaactggttcagcgtctgctcgcgctcgtcattgccaccgccgagaccggcgccgcgatgacggccgaccgcgtcgatttcgtcgatgaagatgatgcacggcgcattcttcttggcctgctcgaacatgtcgcggacgcggcttgcgccgacgccgacgaacatttcaacgaagtccgaaccggagatagtgaagaatggcacattggcttcgcccgcgaccgcacgcgcgatcagcgtcttgccggtgccgggagggccgaccagcagcacgccgcgcggaatgcgtccgccgagccgctggaatttgccggggtcgcggaggaattcgacgatctcctgcagatcgagcttggcttcgtcgacgccggcaacgtcctcgaaagtgacgcggccgtgcgcctcggtcagcatcttggcgcgcgacttgccgaagcccatcgccttgccggcgccgccctgcatctgccgcgacaggaagatccagacgccgatcagcgcgatgaacggcaaccaggagaccagcagcgagacgaaccacggcacgttgtcgccgggcgccttcgcggtgatctgcaccttggcgtcatagagccgcttcacgagcgtcggatcgctcggcgcgtaggtctggaagctcgtgccgttgttgaaggtgccgtgaatctcgggcccctgaatcacgacgtcgcggacatggccctgatcgacctcagtgagaagctgcgagaaggagatgtccgatgacgacgagcgttggccaggattctggaaaagcgtgaacaacgccagcaacagcaggacaataatgacccagagggcgaaattccgcagattggcgttcatggtcttccttcggtggtcgcgcggatcgcggcctctctctatccttgggcagggtctgtgggaatccccagggaatccatcccgtcgatgccctacaatctaggtgccgctggggtcgatgccaagggaaccacgcacgactatttaccgcatcctagcgcgattcccggtcaaaaaatgacgcagaatccggtgtttttccggggtggttaagccgccttgccggattatgacaacggttgaaacaatcgaacccggctcagcgggaacgtgcccggcggggcggcgccgggctgatcctgatgcggccggaagcgacgctgatcacggctccggcaagcgtctgtttcagcttggattcgcgtggtcccaaggccccatccagggcctgatcgaccgcggcgagcagggcttcgaccttgccgagttcggccggcccttcgtgtcccgcgcggtcgatggcgcgcttgagcagacggaggcggatctcgtccggcatcactgcgaacaatgcggcgtcgaagcccgcgtcggggttatcctcgcttttcaacgcaagatagcgctcggcgccatcgaccagcacctccagcgcggcgttggcgcgcgcgatccgcgcggcgagccgcgccaggttccgcgcgtcgccgccttcctcggccagcagcggcatcagcgcgcgcagccgtgggcgcgtgaaggacggatcgcgattggtcggatcgtcggcaaagccgatgcgcgccttctgcagcgtcgcgatcagctgtgccttggaaatatcgagcagcggtcggatcagtcgaatgccgtcgcgctcggtctcgcgcgccatcgccgagaggcccgcgacgccgctgccgcgcagcatccgcatcaacagcgtctcggcttgatcgtcacgggtgtgcgcggtcaggatatgggtggcgccgtacttgcgcgcggcttgcgcgagcaggcggtagcgggccgcgcgcgcggctgccggcacgccggccccgggtttcggtccgctccagcgcagcgtctgatgcggcaggtccaggcttcgcgccagccgcttgacgtcgcgcgcctcgcgggccgcttcaggacgcagaccatgatcgacggtgaccgccaccagccgcggtccttgcgcgagagcgcggcgccagcgcgcggcgagccacatcagcgcgactgaatcgggaccgcccgacaccgcgagcacgatcgccggcgcgcgcacgaggcctgcgaacaggcgcttggcgtcccttgccgggatggcggattggtcgtcaggcatcgcagaaccagcggatcgcgggaaggccggaagcggcctccctgctggtttagcacttcacgcgcttctgctcgcggtcaaccgcagccttgaccccgccggaggcgcgcgggtacttccgggcgatctcgccgaacgcggcgcaggcggcttccttttccttcagcgccgccagcgactggccgagccgcaacagcgcgtcgggcgccttcgcggacttgtcgaacttggtggtcacgccgaggaaggtttccgcagcgtcgcgatattgctggcgctggaaatagctctcgccgagccagtattgcgagtcggccaccagtggatcggtcggatatttcacggcgaagttcttcatcgtctcttcggcgagcgcgtagtccttgcgctgcatgtagccgatgccgaggtcgaattcgtccttcggtgtcgccgacggcggcaaggtggtcagcgccgcgctcgcgccgggggcgcgctgcgggctggtgttgccaagctcgagcggctcgccggccccgcggccgccgggcgcaccgaccgccgcctcattctgcatcggcatctggccgccgccaccgagcacacgcggggcgccgggggcattcgggttctgggtcggatcgaaggcgtcgccgcgtccacggcggcctggagccgctgccggtggcggctcctgtacgatcggctggggcgcagcgatctgctgctggtcatagccaccttgcggttgccggccatagccttgctggggctgcccgtatccctgttgcggctgggcgtagcccggctggacttgcgggtaagcctgcggctgctgtgccggaggcaccgccgcgacattgggttggccggccggagcctgtccaggagcgccgcccggctggccgccgagctggcgcagccgctcctcgagctggcggttgcggtactgcaactcctcgttctgaccggtcagctgccgcagctggttttcaagccgctcgatccgcatctcggcatcggaatcgtcggattgggcaaacactggtgcagaaacggcgaacagcgccgcgatcgccgcggcggaggaaagaaaatgaaacctggatgacattttgccctgacgacgagatcgacgtgaaaagcgagcgacattgagggacggagtacgccggaattgtgactggcagttcaaatccgggatagcgtctcaagacagcgtcgctgacaccggtttagtacggacgctggaacaagcaagcggccaattgcacgcagcctcgtccatcttgatgaaagccggtttgtgccttcgcgcggccaaaacaaaaccggcgcccgaaggcgccggcttggaaaacccatccaggatcgcgtcaggagctggcgttcagcacggtgacggcgcgacggttctgcgaccagcaggaaatgtcgttgcagaccgcgaccggccgctccttgccgtaggagatggtgcgcatgcggctcggatcgataccgcgcgaggcgagataggcgcgaaccgactgcgcgcggcgcgcaccgagcgcgatgttgtactcgcgcgtgccgcgctcgtcggcatggccttcgatggtgaaggaatagcggttgtaggtctgcagccactgcgcctgcttgtcgagggtcgcggtcgcctgcgggctgagatcggtctgatcgctctcgaagaacacgcggtcgccgacattgaccacgaagtcctgctggctgcccggggtcgcggcgcccccaatcgcaccattggcgtccaacgggttcttgttggcgcaggcacccatcgacagcgccaccgccagaaccgcaaccagcttcataccctggagatatttcattcccggagcctccacgctcacgctcttcgtactacccaatcggtctacagggcgatggttaagcgaacgttccgtcaaccttgacgagaccttgctggaccccatcaaatgccaggcaatgccggaaagcgcccccgatggttaatgggtggcaaatgtggcgcgatggtgaagggaaggcaaggttcgcgggaaccggccgcttttgcaagacaatttggtccgcgggcaacagccggccaacgtcagatcgatgcgaatgccggttttctcagggattcggcacgatcgacgcgcgctcgaacggccggaccataccatcgggctgcaattggccttcccgatcgaacagcatccggcgctcgaaggcactcgagcgcaggaacggatagcgggccagcacgcgttcccgcaccgtcggcagatgcgacgccattaacccgaccggcttcacgagccccgggtagaggcgcggctccgaccaggtctcgtgcaggaacacgcgccggtagaacgccatgtgctcgggccggaccggcgccaggccgtaatcggcattgaaatgcacgcccgcggtcgagccgagccgcaccgtgacatagggcagttccggattgttccgcgccttctcggggtccgcgacgaagcgcgtcgaatcgatgaagaccagcccctgatcgagtttcggcagcagcacatcgccgaacacgtcgagcgtcggcgaggagcgccactccggtgtcaccaccgtgatgcggatcgaactgcagagctcaccttgcagatagacgccgaacacccaggcattcggcgcatcatcgaacgcatcgaccacacgctcatctgccgagggccggatcgcgccctcgcgcagataggcgcggtaacgcagccggtagatctcgtctttctgttccggggtctgagcgaggcggtagtcgacttgatcgagagggtccgcaagccttcctgtcgcgggcttaatggcttcggccgcggacctcatgcggtactcccctaacaacccaacaacttcaacgcgcgtgccaaaaagattaacagcttcttaattttcgtcaaagcaatcgaggcaatacggttaacttccgaccgcaaggctgcatttcaaatcgtgcggtcgaatgttcccacaactatcgattgagcctattgcgctggatcaagcaattgagcgcgagggaaccacttgcagctgctcatcggtccgccggccatgcgacgcattgagcagctggcggatgcggaccgcgggaaccggccggctgaacaggtatccctgggcttcggtcaccgcgccgtcggcgctgatcagttcgagctgctcgttggtctcgatgccctcgaccacgaccgacatgccgaggtccgccgacagccgcgccacgccgcgcagcagggtcagcggccgatcgctgtcgatgccttcgaggaaggaacggtcgatcttgaccttctgcaacgggaaattgtgcaggtagctgagcgacgagtagccggtgccgaaatcgtccagcgaaatccgcacgccgagcgagcgcagttgcgacagcacgtcgtgggtcagctcggtgttgtgcagcagcgaggattcggtgatctcgatctcgagccggtgcgccggcaggccggagacctcgagcgcgtagcgaacctcgctcagcacgtcgcgctggtggaactgctgcggcgagaaattgaccgcgacgctgaccgcctccggccacttcatgcattccatgcaggccttgcgcaggatccagcggccgagatcgacgatcaggcccatgtcctcagcgaccggaatgatgtcgaccggagagacggtgccgcgcgctggatggttccagcgcagcagcgcctcgcaggtgctcaccttgccggacttcagattgatcagcggctgataaaacagctcgaattcctcgttggccagcgccttgcgcaggtcgagctcgaggatgcggcgggcctcgacggtttgcgccatctcgtcgcggaagaagcagaaggtgccgcggccgtcggccttggcgcggtagagcgccatgtcggcgttcttcagcaacgtgtcggcgctgacaccaggcgcagtcatcgcgatgccgacgctggcgccgatctcgaccaggtggttgtcgatcttgtagcgctcgctgaggcggtcgacgatgcgccgcgccagtgcggcggcgtcctcgtgcgattggatgttctgctggaacacgacgaactcgtcgccgccgaaccgcgccacgaaatcctccggacgcagcatctcgcgcagccgctcggcgaccgcgcagagcagctggtcgccgcagggatggccgagcgtatcgttgacctgcttgaactggtcgaggtcgacgaacagcaaggcggagcggtggtcgccgcgctgcatggcgagcagccggccgatctcgtcgcggaaattgacgcggttgggcagcgcagtcagttcgtcgtaacgtgcgaggtggctgatcctcgcctcggcgtccttgcgctcggtgatgtcctcgaccagcaccaccatgccgccgccgaccatcggctggaacgtccagtcgagcgagcggttctgggccggatcgggatcgctggtgacgatgtcgccgcgctgcgaactctcgatctcgtagagaatctgttgcgcggccgcgaccgagatcacgccggacagcacgcacgcattgcagatgtcggttgcgctggcgccgcgctgcacgaagtcgtcggacagctccatcatctcgatgaagcggtggttcatcaccgcaaggcgtccgtcggcgcggaacatgcacaagccgtgcggcatgttgttcagcgcggtatcaaattgatgcgccagcgccgcctcgcgctccttggcgatccaggcattgacgtagatgcgctgcaggctcgtggtgaggtggcggatggcgctgaagaataccaggctgagcagcgcaagcgcgatgtgatagggaccgccgacatacatcagcgcggcgatcaggggaccgatcgacatcaacagatgcagatggaaaatctgcggccggccgaaggtccgtccgacccccgccgaggtataagcgaccaccgtggtcacgcagagcatatgggctgcggcatcgttggtagtgaccaagacggcagcgccccacaggccgagcgcaatgccgtaggcgaggctgccgatccggtagcgcttctcccacgtcacggattcttcgacggtgagccgggaattgcgctgctggtagcggtacatctgccacgcgcgcgccagaccgaccacgatgaacagcggcacgcacagccaggacaacagatttccggtgacgaacgcaatcacggcgcccgcgatcgcagggccgaaagcgccgaagatcatgggcgcagggttcatgaacagggaatcgaccagcgccgcggagatcgtcggcgacatcgactggtccggttctcccgtctgacttgcaaactgcattgtgagagcgcatgtccttttcagctcgcactcttactggtcgctggtgaagtctttctgagggaatatcgttagcgagtccttgcaatggaccgccaaaggccggaatacaccattaaattcagtgcgctagatgataagcgccgacggctaccgtggttccccgtggccgtcgacgaaagctcatgacaacagcggcgaccaggcgggatcggaggcaaaacccggggtcggcacccgcagctcgttgcgcccggagacgtcgatggtgaacagcgacggtccgctgttaccgcccggatcgcggaagaacatcacgacgcgcccgttcggcgcaaacgtcggaccctcattgtggaagcccgaggtcaggatgcgctcgcccgagccgtccggcttcatgatgccgatcgcgaactgcccgccgccctgcttggtgaaggcgatgtagtcgccgcgcggcgaccacaccggcgtcgaataggtgccgtcgccgaacgagatgcgctgcgcctggccgccggttgccgccatcacatagatctgcggcttgccgccgcgatcggactcgaagcacagccgggtgccgtcgggtgcgtaggacggcgaagtgtcgatcgccggcgtgtcggtcagccgcgtcatcgacttcgagcgcagatccatcacgaacaaattggagttgccgccctgctgcaggctcatgatgacgcgctggccgtcgggcgagaagcgcggcgagaacgacatgcccgggaagttgccgacgatctcgcgctggccggtctcgatgttgagcagatagacgcgcgggtcgccctgcccgaactccatataggtgatttcctgggtcgacggcgagaagcgcggcgtcagcacgagatccgagccgcgagtgagatagcgcacattggcgccgtcctggtccatcagcgcgagccgcttgacgcggcgatccgccgcgccgctctcgtcgacgaacacgacgcgggtatcgaaataacccttctcgccggtcatgcgctcgtagatctggtcggagatgatgtgcgcgatgcggcgccagtattcggccgaggtgtcatactgctggccggccagctgctggccggtgttgacgtcccagagccggaattccgccttcacgcggccgctgccctggcgcgtcatccggccggtcaccagcgcctgcgcgttgatgctcttccaattgttgaagttcggcgccgcgtcgatgttgatctgcttctcgagataggcggcctgatcgatcggcgcgaacaatccgctgcgtttcagattgttggtgatcacctgcgtgacgccgacgccgacttcggcatcgccgggcgtgccggcagcgaaattcggaattgcgatcggcaccggggcaaactcgcctcctggaatctgaatctgcttgcgcccaccctcctgtccgatggcttgacggaaggggccgccagccagcgctccaagcgcggccatgccggaaatcatctgtcggcggttgaggcgatctctcatcgcgcaccaattattcttgtctgtcatcgtcggtagactttggttgatgttggcaaaagcatcgccgctaatctcacgtattattctctttgaacactggtgcgaatgccttccattcgtcgtaccagcccgcgggcagattgtacggctggcaggcgataatcgcgcgcatggcgctttcctgataaacgcgcatatagggcgtcgccggcgtgtctactgctaccggcatgcgtgcgagcgtgccgtcgcgcttcagatcgatatcgaacaccacctgggtccgctgctcctcgagactgccgtaaggtttgtttttccagcagcgttcgacctgctgcctgaacatcgcgccccagctggcggaattgtcggcggacttgccctttgccgtaccgagcgccgcgttggcgttcattgtgtcaccggtgatcgacgcgcgtgtcggatcgcgcttgtcgagtagagccgcgatcttgctctggtcgaacacgcgatccttcggcttctgctcctgtggcggcttggcggcctgctggaccggcttaggcggcggcttcttctcttccttcttgatcgcttccgcgatcggatctggcttcaccggatcgggcttcttctcgaccggcttcggctcttccttcggcttgttctcgaccttcttcggcggatccggcttcctgtcttccggcttctccaccttcggtgtcggcgccggggccatatcggtcaccaccggcggcttcttgtcctcgatcttgccgacggcatcgtcaaccggcttggcttcggcgaccttctcgaccaacggcttgggattttccttcttgccgtccttttggccggccatggctttggagagctggctggcgtcgatcacgtcgaccgcgaccgcgtcctcttccggcatgacgaaggccctggtcgaaaacgacaccaagccccacccgatcacgaggacgtgcaggacaatcgatgccgccagagtcttgtcgaccttgaccttcaaatcaggcttccccgtgccttgtcgcacatggtggttatccgccttccgggatgatgacgatgttcgccttgaatcccgcggcccggacttccccgagcagtttcatcatatccgtgtaacagacgtccttgtcgccgcgcagatagaccactttttcagcgtccgaccgggcgtctccgatcgccttgatcttggccgggaaatcgactgccgtgaccggcgcgtcgccgagatacagctcgacattcgagttgcagccgccgccggtccgcttgaccgacaatgtcagcggcggctggttcgacgagatcgacttgccgccgctcgcgaccggcaggtcgatgtcgatgttcgacgtcatcagcggcgccgccaccatgaagatgatcaagagcaccagcatcacgtcgaccatcggcgtgacgttgatctcggccatcaccggcttgcgcccgcggcggcgcctgccgccaccgccggaccctgccatgctcatcgccatgatcgtgcgctcacaacagtgaccatcattggtctcagccccgctcgtcgatctgacgcgacaggatggccgagaactcgtcggcgaacccctccaggcgcgcggcctgccggttcacctccgaggtgaacttattgtagaaaatagtcgccggaattgcggcaatcaggccgattgcggtcgcaaacagcgcctcggcgatgccgggcgccaccaccgccaaagaggtatttttcgaggccgcgatcgactggaagctcgacatgatgccccagacggtgccgaacaggccaacgaaggggccggccgagccgacggtagcgagcaccaggagccggcgttccagccgctccacctcgcgggcgatcgagacgttcatgaccttctcgattctggcctgcaggccggcaaacgaccgcgactggctctcgaaggagcgcttccattcgcgcattgcggccacgaaacaggccgccatcgactgggtcggcttggccgagagcgcccggtagagttcctcgatcgactggccggaccagaacgcctgctcgaacttgtccatcgcccgcttggtgcgggcgtagagcaggatcttgtcgatcgcgatcgcccaaacccacaccgagcaggacagaagtcccagcatcacgcatttgacgacccaatgggcctgccaaaacaacgcgatgagcgacacatcgctcgatgccagtggcagagttgactgagccacatcggcgggattcatcggcaatatcctctcaacgcaagtgtcccaattcggcgggccgccaatcggcgccccttccacggccacgcgcccggcgcggcaaaactgcgcgagagcctcttacatctgtcgcatggggggcccgtccaaagccgggccttgcttcccctgccaacatgtcaaaacgagggcttttcacgcgtcattccgaccctaaccagacgctaatcatggttaaggcgaggttaccaaagggaaatttggaggcgggaaacgccgccggcggagggcgttggcgagttcccgggatgaacggtttgccgccgggtggcggggtggctccccgtcgtcctggcgaaagccaggacccataaccaccgcattcggtaacggacgggatcgtggacccggcatcgcgcagcaattgagatttgggtaatgggtcctggctttcgccaggacgacggtggtggaatggtcgcgatcccactgccacaccaccggtgtcccggaatccattcatccatccgatgcgccgcctgatcgattccgggctctcgcttcgcaagccccggaacgacgacggaatggtgatcgcctcgctaacctcggctcaggtcaaatgccgcacaatcgccaatccggcaaacagccccatgatcgacagcgccaccgagcccacgacatacagcgccgccagccccagctcgccgcgctcatagagcagtgcggtgtcgagcgagaaggcggagaaggtggtgtagccgccgaggatgccggtcatcaggaacagccgccagggctgcgaggcctcgcccctgaaggcgagatagccggcgatcaggcccatcacggtcgagccggtgatgttgatgatgaaggtgccccaaggaaatgcggtgccgatggagcgcgcacaggtgacgttgaccagatgacgcaacgtcgcgccgagaccgccgccgaagaagacgaggagatagcttgtcagttgccccatgagggctttgtgccgcatggcggccgatgtcgcaagaaaacaaaaagggcggcaatcgatgatgccgccctcttccaaaaaatctcgtcgtcattccccggtgcgcaattgcgcacctgagggcggtccgcaggaccgaacccggaatgacagccgatgtgtttagccggccttgccgaacagctcgtcgacgtagtcccagttgacgaggctgtcgacgaacgccttcagatagtccggacggcggttgcggtagtcgatgtagtaggagtgctcccagacgtcgacgccgaggatcggcaccgcgccgtggaccagcgggttctcgccgttcggggtcttggcgatctcgagcttgccgcccttgacctgcagccaggcccagccggagccgaactggccgacgccggcggcggcgaagtcggtcttgaacttctcgaagccgccgaggtcttcgttgatcttcttctcgagccggccgggcagcttgctgccgccgccattcggcttcatccacttccagaaatggatgtggttgtagtgctgaccggcattgttgaagacggccgcgttcttgccgaacgagcccttcacgatctcctcgagggacttgccttcgaattcggtccccttgatcgcgttgttgccgttggtgacgtaggcctggtgatgcttgtcgtggtgaaactccagcgtttccttggacatgtagggcgcaagggcgtcgtgggcgtagggcagatcgggtagcgtgaaggtcatggggtaatgtccaacagagggtgggagactacacttaacgggtcccccttatagaaggttccacggcggagaaacaccgcattttcagatcgtgtatgactggccggcagagcccgagaccacacccaggacggcgacgatgagcatcgaaatcgacattctcaacggagatgcgtcatggcagcgcgccgagccgctgcttcgggcggtctggagcccggaagtcatgcggaataagagctgggccgatatcagatgggctcacgcggatttgcgcgtgctgctcgatgcgcccgacgacagcgggctggcctgccatgtcggtatctatttccggaccatcacctggaatggccacaaggtgcatgtcggcggcatcggcggagttgcgacccgcgaggactgccgacgacgcggctatgcgtcgctcgcgctcgacgccgccgtacacaccattcgtgccaatgacgcggtgaaatttgcaatcttattctgcgagccgcacaatttcgcgttctacgaggcgcgcggctggcatcccttcagcggcgaagtcacttgcgaacagccctctgggcagattcggttcgaggcaatggcgccgttcgtcaacgacatcgtccgcgccccgcgccagggcaggatcgacctatgcggcctgccgtggtgacccctgcacgcgcgcgggtggttcgcggaggccgcgcaccgtaacatgtcgatcatcatttattgattccgagatgatcgattgacgtcgaacagcgcccgcatcggcaacatgccccctctcccgcgggtcgccgacgcatgaccattgaagcctcgatcgacgatgcacgttccgccgcggccgcgcctgcggtagcggtcgatcacctgctcaccgcaccgatcctgccgacgcttctaaggctcgcggtccccaacaccatcgcgatgttcggctcgacgctggttgcggtcgccgagacctcctatatcggccggctcggcaccgagccgctggccggcatcgcgctggtgtttccgttcgcgatgctgaaccagatgatgtcggcaggcgcgatgggcggcggcgtctcctcggcgatcagccgcgcgctcggcgccggcgaccgtgaccgcgcggccgacctggcgctgcatgcggcgatcatcggggttggcctcggcctgttcttcaccgtgatgatgctgggcttcggcagcaacttctacgcgctgctcggcggacgcggcggcgtgctcgaacagtccttgcattactcgcaggtgctgttctccggcgcgatctcgatctggctggtcaacacgctggcctccgtcgtacgcggcaccggcgacatgcgaattccctcgatgacgctgatcacggtttcgatggtccagatcgcggtcggcggtgtgctcgggctcgggctgttcggcgtgccgagcttcggtatgcgcggcgtcgctgccggccagctcaccgccttcacgtgtggcgcgatcttcctggcctggtatctcgcctctggccgcagccgcctgaagctcgacatcgccgccttcagattccagcgcgcgatgtttctcgacatcctcaaggtcggcgcgatctcctgtctgtcgccgctgcagagcgtgctgaccatcctgatcttcaccaagatcctggcgggcttcggcaccgagacgctggccggatacggcatgggctcccggcttgaatttctgttgatcccgatcgcattcgcggtcggcgtcgcctccgtgccgatggtcggcatggcgatcggcgccggacttgtcacgcgggcccgcaaggtggcgtggaccgccggcacggtcgccggacttgtcgtcggattggtcgggcttgtggtcgccctcaagccgacgctgtggatcgcgctgttcaccaccgatcccggcgtgacggccgcggcttcgtcgtacttcgcgctggccggaccgggcttcggcttcttcggcgtcggcgtttgtctttatttctcctcacaaggcgcggccaaggtcggcgggcccgtgctggccggcaccatccgtctgttcatggtcggcatcggcggctggtggctcgcaaccgcgagcgccccggcttggacgctgtttgcgctggtcggggcggcgatgatggcattcggcctcgctaccatcatatcgattcggctaacccgctgggaatagcatcgccttacctgagcatggcggccgcggaaactatctacagaattttttggatcatacgcgcctgatcgcgcgaatatgacattgcagaaatctttcgacttgttatgcaggccgaccttttggggaattgccatgacctgcaaactcggattcgtgatcgcaatcatcgcaacggcgcttgccgtacctgtcgcgcatgcacagggcgcgcctgaacctttcggcgtctggcagacccaggcgggcgacgcccgcgtcaagatcagcaaatgcggcggcggcatctgcggcgtggtggtgagcctgcgtgacccgatcgatccgatgaccggcaagccgcaggtcgacaacaagaatcccaacccgtcgctggccaaccggccgatcatcggactgtcgttgttctccgccatgcagccggtcgccgcgggcaaatggtccggccagatctacaatgccgacgatggcggcacctatgcgagcagcgtctcggtcaccagcgagagcacgctgcgcgtcgaaggctgcgtcggggccctgtgcggcggcgagacctggacgcgggtgggacggtgatttctggctaggaccgcgaagaaggtgcgctccctctcccgcttgcgggggaggtgcgtcgagtttgcggcatcaatcgaaactaaatcgcgcgtgccttcagcacggtagcggcggaggcataaccgccgcgggcgccgtcgatgaagtgaacgtggtcggcgcgcatcaccgacggcgtaaagcaggtcatcatcgccgcatcctgttcgtgcaggccgtagcgcacgacgccctgcgcggctgcggcgacgaggcgctgctcgagctccgcggcgagctccgccgtgcagtccaggatcatgcgcaggccgtcgtcaaacttgcggaagtcggaattctcgaccagctgccgcacataggccttcggcacaaatttgccgaccgggatgttgaaccgcatcaacgtgtacgcccacagcgtgaaagcgagcacgaccgcacgccgcagcgcgagcgagccaccgcgccgcgcacgcgcttcgtattccagcccttgcggcggccagcgcagcggcgggccattggcgggcaccggccgtccggcatcgggacttttctcgacgcgcccgacgatgtcctcgatcaccctgcggaaggaatccggatcggcacccttcgccggcagcaccagtaccgagaggatgacaccacgcgccgagggcatcacctcgaaacggcaggacaggcccgacagatcgggctgcgtaccgggcggcgccggatcgaccgcgaactcaccgcgcttcatcgcggcatcggcgtaagccagaccgccgccggagaacatcgcataggagagattggccgacggcccgaaccgcgcgacgcgcacatcgaagcccgcggcgcggatcgcggacatcggcaccagcgccacccgcagcaccaggtcgaggtcgtcgcgcacccagcgcgcggtcgcggccagcgcttcgcgcgctcgctcgagatcggcgggcgcaaccgcgaagctcgcaccgtcgccaccgaacacgaacggaaaatcgcgaccctccagcgcattggtgacggaagcgaccaccgcggcaccggccatgttgaccgccttgtagcgctgcgctgcgatcgccttggtcgattccacgatgtcggcgacgccgaccgtccagtcaccgggcagcggcgcatacagcgccggatccatcaggcgcgcgaagccgcgaaacaccggaatgccgctgtagaagacctcgctgccgcccgccatcgcaacgccgtgttgtttccttgcccagagcagactctctagcagatacgcggggaattggggcggggttttgccgcgtagcccggtcccgtcatccccgcgcaaaggcttcgcctttgtcgctggaggagccgcgaagcggcgtctcgaaggatgaacggcccggccggtggccgtcgaccctttcatccccgcgcaaaggcttcgcctttgtcgctggaggagccgcgaagcggcgtctcgaaggatcgacagccaccagccgggccgattcatccttcgaggctcgtccagcggcgcaagtgcccgcaaggctcgcgcctcaggatgacgggacttgcaccatccgcgggacaaggcatccgaccatgtcgatgaatttggtggcgtcacgccgcctcgcccgcccgccgccacggcggaaacggatcgcgcagcttctgccatgcctgcgggtccatgccgggcttgccggtgacgaggcaggcatcgagccggcggcgaatgtcgtcttcgctcatcccggagccgatgaagaccagctcctggcggcggtcgccatagagatcgttccagctccgctgcatcatcagccgccaatccggctgatccggccagcgctcgcgcgggatcgcggcccaccacgagccgaggccttcggtacgcacgatcgcgccggcctggctcatctcgccgcaccagtccgggcgggtcgcgatccagaaatggcccttggcgcggatcacgccctgccagctttcgcgcaggaaggcatggaaacgcaccggatcgaacggccgccgcgcgcgatagacgaagcttgtgatgccgtattcctcggtctccggcacatgcccggcgaacccataaagctccttgtgccagagcgggtgctgctgcgcgcgctcatggtcgaagcggccggtgtcgagcacacggtcgaacgggatgttcgcgaagctcgcctcgacaatgtcggcatccgggttgagcgcgcgcacgatcgtagccgcggcctcgcgctgcgccggggttgccgcatcgatcttgttcagcacgatgacgtcggcgaactcgatctgctcgaccagcaggtcgaccagcgtgcgcttgtcgccgtcgagcgcctcgccgcgctggctgaggaaatcggtcgaggcatagtccttcagcaggttggcggcgtcgaccaccgtgaccatggtgtcgagccgcgcgacgtcggacaggctctgcccatcctcgtcgcgaaactcgaaggtcgcagcgaccggcagcggctcggagatcccggtggactcgatcagcagatagtcgaaccggccgctctcggcgagcgcgcgcacctccttcaggagatcgtcgcgcagggtgcagcagatgcagccgttgctcatctcgaccagtttctcgtcagtccgggacaggttcgcaccgccatcgcgaacgaggtcggcgtcgatgttcacctcgctcatgtcgttcacaatcaccgcaaccttcaggccgcggcggttgttcaggacgtggttcagcaaagtggtctttccagccccgaggaagccggacaagatggtgacggggagtttttgcatcgagatcaaacagttgctggagggacaggcggcggcgggacatgcggcattcactagatgtaatgttataacataacaacaatagtccacggccttgtcaagatggaagctgccttcagcggagacggcggcttgtcgaatgcgcgcaccggccccgtcgcgaaaagcatccactcaaatgtgggccgcttcacgcgcgcgtctcatctcaggttgtaggtttggaagaatgcccgcctgaacccgaaaggaacacgccgtgaccctcgcctacggattcgtcaagaccaaggtgacctccgagcccacgctgaagccgtcacgccacgggcacgagacgcaatatcacctgcactgcaatctcgatgtcgacggcgagcaatgggacgttgcaatcaatgtcggcaccaatgacgcggacgatctgctgaaatacaagctggtgttcgacttccgccatccggtcatccagacgcttgcggctgcggccggcggttcgcaggatctaaccgggcaaaggaaattgccggcgctcgatttcctgcgcagcaacctgctcgacaacaccggcaaatggcgcgacagcgacgtgatggacggctccgacgacaccgagccggcggcgacgctgaagcggctgctgtcgcgcgcgcatcgggagagccgcgacgtctacatcttcggccgcttctacgcgcagggcgacggcctgcacgacgtccatctcaaccagggctcgagcaagggtttcatccatcgcccgggcgatgactccaacgaccacaacgacatctggcaggacggcgccgtcatggtcgatctcggcgagccggaatgggcggcctatttctccgccttcacccagcagttggtaccgaccgacgatctcggcaatccgcagccggacgcaaccacgatcggctgaacagggctaccccttccccaagccgcgcagcactagctggttcatacggctggcgaacgcggcggggtcggcaggcatctcaccgtcgaggatctgcgcctgctcgaacagcaacagcgcgaggtcctttgcctgtgccgtgtcggtcgcgagcgctgcgaccagcgggtggcgcagattgatctcgaggatcggtttggtgatctcgccgcggttttgctgcgccagcagccgctcgagcgcgcggtcgcgcgcatcgccaccggcgacgaggcacgacgcgctcgcagtcagccgctgcgaggcgcgcacgtcagagacgcgctcgccgagcgcatccttgatcacggcgatcgtggtcgcggcatcggccgcgggctcgtccgtcttgtcctgcttgtcgtcggcgagcggaatcaggccgaaatcgacatcgccctggctcagcgacttcagcggcttgccgccgaaatcgatcggcgccgaggtccagaacgcatcgacgggatcggtcagcagcagcacttcgatgccgcgggcgcgcgccgattccagcttcgggttcgatttcagccgctcgacgctgtcgccgaccaggtaatagatctcagtctggttcggcttgaagtcgtcgacaatctgcttcagcgagcggttctcgcccgacgtcgtggtgaagcgcgaaagcgccagcagcttctcgcggcgctcgaaatcctcccacaggccttccttgatgacagggccgaacgcatcccagatcttgccgaagctctcgggctccttctcgctgagcgtctccagctcgccgacgacgcggctggtgaccgccttgcggatctgcgcgagttgcggattgttctgcagcatctcgcgcgagatgttgagcggcagatcctcgctgtcgatcacgccgcggatgaagcgcaggtaggccggcagcagctcggcgtcgtcggcgatgaagacgcggcggacatagagcttgaccttgcccttgcgctcgacctggaacaggtcgaacggcttttgcgacggcgcgaacagcagcaccgcgtaggactggcggccctcggcgcggtaatgcagcgtcatcgccggctcgtcgaacgcgcccgcgatctgcttgtaggcctgcgcataatcctccggcttcagctcggatttcgagcgctgccacagcgcgctcgccgaattgatctggcgcggctcgccctcctccggcaccagcaggatcggaaactggatgttgtcggaatattcgcggacgatgcgctcgatctcgtaagcctcgagatatttggcggcgtccttcttcagatgcagcacgatctcggtgccgcgcgcgacgcgctgggctgcctcctcgctggccggcgcgatctcgaaaccgctgccgccttccgacgtccacacccagacctcgtcggagccggcgcggcggctggtgacgatgattttgtcggcgaccatgaaggcggcatagaagccgacgccgaactggccgatcagattggcgccgtccttggcttcggtcagcttcgacaggaacgatttggtgccggagcgcgcgatggtaccgagattgtcgatcagctccgcccgctccatgccgatgccggtatcgaccacggacagcgtgtcggccgccttgttcgggatgatcctgatctccggcggcgtgccatcggtgatcaggccgggattggcaatcgcctcatagcgcagcttgtcgcaggcatcagacgcgttcgagatcaattcgcgcaggaagatgtcggtctcggaatagaccgaatgcaccatcaggtgcagcaattcggcaacctcggcctggaacggctgggattcagcggcggcagttgtggtcatgcgggaaactcggacaaacgtgaggtggcggaaagccctgatatagcgcgatcgcgccccgtggcaagatttgcgagccgagggaaccgtcaatccgatatcgcggagagatagcgctgcaccgatcggtcgaacgctgccttggcatcggaggcgatgttcttgccccaccaggcgccgtagatgcgatcatacgccaacagctcgaccgcgcgcgcgacgcggcggaccgctgacgcattgagcgggatgtagttcggataggaatacatgaaactgaccgagcggcggtccatcgccaccatcgcaatgtcgccggtgagcagcgcaccgcgcccgtcggcgcccctgcgccaatgcagcatggtggcgccggcgaaatgccccccggcccgcaccagcacgatgtcgtcggagatgcgatggctgtcaccctgccacggtacgatcgaccgatagggccgcgtcacccattgcgcgtcgtcgccgtgcagatagaccggcgcgtcgtcgaacgcggcgctccagtcggcgaccgcaccataataatgcggatgcgagatcgcgatcgccttcagcccgccgagcgatctgacatgtgcgatcgcctcggctgtcgccagcggcacgcagtcccacatcacgcagccgccgcgatccggcaccagcagcgcgcgctgcccgatcgcaaatgacggctcgagcgccaacccgacgaggccgagatcgtcgcgccagacgagcttgtgccggcctgcgagctgctcgcgagtcagccacgcctgcccgttccagttgacatattgccgctcgtcctcgcagatcgggcagcacggcggcggcgccgcggtttcgggaaattgggcgccgcattgttcgcaggtccagagaggcatgagagcacacgcgttggggtgaagccgtacgcctgctgtacgtcagcagcggaagacgttcaatgccggcgccccagttccatctgcatctcggcgaccaagctgttcggccagtggggtatcgacggcacctcgctcaccgacgtcgctggggtggcgaaagtaccgctctccagcatctacgactatttcgaggacaagcgcgcgctggtgctcgacgtgcccgaaggcaattacgaagcgctgtatcagaagaccgagccgctgctggtgaagggcggcgacccggtcgagcagcttcgcatcacggccgcaaatacgacctggtgaagaagggcgggacgctgttcaccaccctgcacaacgggttcgttcagcactaaagcgcgagaggttgggttgaatcgtcatcgcgctttggttcgttgcttgagcatgatcttttcggaaaaccgcttcgcacttttccgggtcatgctttaggcgtgccctcgacgcgccggccgtgcaaatgacgacggtttggtacaagcgatcgttgcagaaaatcgttacacagtcttgccgatcatgttctagtgtgacacggcgacgccccgcggccggacgcgcgggcaccggggatgggagcgaaccgatggacgtcaaggctgttctgccgccgcgaggccgcgactatcggctcgatcttctgcgcggcttcgccaattgggcgatctatctcgatcacatcccgaacaacgcggtgaactggatcacgcagaagaacttcggcttcagcgacgcggccgatctgttcgtgttcatctccggctacaccgcatccttcgtctacgcgcgcatgatgctcgaacgcgggacggtgatcggcgccacccgactgatcaagcgggcctggcagatctatgtcgcgcacgtcctgctgttcgtgatctacatcgccgagatcggctacctcgcgcagcgctaccacgaccccaatctggagaacgaattcaacgtcgcgggcttcatgcagaatccggccgagacgctctatcagggcctgatcctggcgttcaagccggtcaacatggacgtgctgccgctctatatcgcgctgatgctggtctatccgctggtgctgtgggcaatgctgcggaagctcaatctgacgctggcagcctcgttcctgctctatctcgccgcacgccatttcggctggaacctgccggcctatccgtccggcacatggtacttcaacccgttctgctggcagttcctgttcgtgttcggcggctggttcgcgctcggcggcgccagcgaatcgatcaatttcatccgctcgcgcgccttcctgtggctcggcggcgcctatctgctgttcgcactggtcatgaccctggcgggccgcttccccgaactcggccaggcgatgccgccctggctctatgatgcgttcaacccgaacgacaagaccaacctcgccccctatcgcgtgctgcacttcgtggtgctcgccttcttcgtcacgcgcttcctgccgcgcgaatggccgggctacgaatggccgatcatgcagccgatcatcaaatgcggtcagcagtcgctcgaagtgttctgcaccggcgtcttcctcgcggtggtcgcgcatgtggtgctggtcgaggtgtccggcagcctctggatgcagatcgtggtgagcattgtcggcatcgtgctgatgaccgtgctcgcttattaccgctcctggtcgaagaaggtcgacaaggcgcccgcgaagaagcaagtggctgcgcaggcgccggcggccgcaaatccggcggaatagccggcaggcctctcaaggccggcgcgggtggccagcggcgctctcgatgcgctagagtggtgggatgtcccgcgcctttgttcacgaccatcccgacatcctgcaactcgaagccgacgtgctcgacgcacggcccggcgcaatcctggtcgaacactcgccgttctttccgggcggtggcggccaactcgccgaccgcgggttctgagatggtcgggcggcgagctgttggtgaccgggctcgcgcgtgacgaacgcggcctctggcacatggtggaggatgatcgcctgatcttcggcaaggtcatgctcgagatcgagccgacatttcgcgcgttgatgtgcgagctgcacacgctcgcccatgtcatcaacgcgctggtctacacgcggttcggcggcgcgcttctgaccggggcgcaactcaatgccgacggcaccttccgggtcgatttcgacctgcccggcgccgacaatgaaggcctgcgggcgctcgaggcgccgctgaacgacatcatccggcaggaccttccggtcagtgccgccttcatggcgcataccgaggcgcaagccatccccggattgttccgcagcaaggccgtcgcgccgccggtcggcgaagacggcctcgtccggatcgtcgagatcctcggtctcgaccggcaggcctgcggcggcacccatctggcctcgaccgggcaatcgcgccctgcgcgtatcgtcaagatcgacaacaagggccgccagaaccgcaggatcaagctcgcggtctgaccggccccggcaagccttgcaccgagcaacccttacgccaccaacgtcctggtcgtgcctggggacggcgttgcgagcgggtgctcgacggggcgcgatcggcttgttaagtcgcgtcttcgcaaggatgatttgagtcgaggacatgaccgtagcgatcgagatgggacaaacgacggccggcgccgcggcggccatcgacctcgaggagctattggccacgcgcctgctggtgcagggcaattcgggttccggcaagtcccatctgttgcgccgtctgctggagcagagcgcgccctgggtgcagcagaccatcatcgatcccgagggcgacttcgtgaccctggctgagcgattcggtcacctcgtgatcgacgccgaggatcacaccgagcgcagcctgcaggtcgccggcgaacgggtacgcatccatcgcgtctccacggtactcaatctcgaggggctcgacgccgagaatcagatgcggcgcgctgcggccttcctcggcggcttgttcgacgttgcccgcgaccactggtatccgatgctcgtggtggtggacgaggcgcagctgttcgcgcccgcgatcgcaggcgaggtgtccgacgaggcgcgcaagctgtcgcttggtgcgatgaccaatttgatgtgccgcggccgcaagcgcgggcttgccgggatcatcgcgacccagcggctggcgaagctcgccaagaacgtcgcggccgaggcctcgaacttcctgatgggccggaccttcctggatatcgacatggcgcgcgccgccgatctgctcggcatggagcggcggcaggcggaagccttccgcgatctcgagcgcggacaattcatggcgctgggaccggcgctttcgcgccgaccgctcggcctgcgcatcggtccgaccgacacacagccgcgcaatgcggccccgcgcctgatgccgctgcctgaagcgacactggaggacgcgcgcgccatcatcctcgcggccccgccgcccgaaacgaccgccaggccgccgcgccgggcgccggcacccgacctgctcagccagctgatggccgccaggccggcggtgccggagttcgatcccgaggccgcggagccgtcgccgagcgccgagcaactggccgagcggcgtgagcggctggatcgtatcctgcgcgccattctcgccgagcccgatgccggcttccgcgccatcggcgtgctctatcaggagttcgtggtgcgctgccggatcgagggtctcggagccgtggtgccggagctgaccgatttccgccgcatgctgacgcgcgcccgcgccggacttggcaccgagatggcggaagacgacgcctggcaggatgtgcagctgcgcgccgcgatcctgcccgaggacatgcagggcgtcttcatgatgatcgcgcgcgctgcgaaggaaggctggccctgcccgagcgatgccgcgatcgcccgcgcctacggcacgcactcgctgcgccgcgcgcggcatcttctgacctatatcgaagagcagggcctgatcgtctgccagctcgacggcgccggaaggcggatcgtgacgctggtggaactggcctgggcgaccgcggccgccgacccgaacgccgacgacgtggcaacggaggcggccagctcgccgctgtgatcgaacggtgagccgcgcgccgccgggcacggtgcgtaccccggaagcacggcatgagacgaacatgaaacgaaaaggcccaccgagtggtgggccttttgtctctgccgacgggcggaaccacctaccttggtggcggccccgcatgcctatccttcaaaccttcacgcgtgctgtggctgcgccagctgactgacctgcgtcgccggcggatcgacaaccagggtgccgccatggccat

SEQ ID NO: 25 - DNA, 126426 bp, Bradyrhizobium enterica
gcagaaacggccccgcctttcggcggggccgttgccgtggaggccccttagtcccggttcggtcgggaccagatgagctggaggccctcctggccttccacctcgatcagggtggcgtagatcggggccgggaagctcgggtcgtccagcttgaccgagagatagtcccgctcggtgtccttggcggtcttctgccaggccgcgcccagctcgacattgccggcgaagatgcggaagtgcggacccttttcggagggggtctcgacgcggaccagcttggccttggcgttgagagcgagcgtgcggacggtgccggtgaagccgttgccgttcgaagtgaaggtgccgatggttgccattgtcgtgtccttttcagttttccgggccgcgcccaccgcagcctcgatggctggctacagaccggaggcgatcgacccgcaccccgcaggggccggcacgcagtagagggcagccaagccacgactttcttgatttccgcgaggaatggacgcgcagcggccaggggaagaaagtcgtggccggatgttgcggggataagagcgaggcggagcaaagcgacgacggccttcggtcagacatgccaaatcgaggacgccgtgggcgagactgatgaaacggccgggtgacacgacagcgaccttcggggccagggcgacggacgcgcatttaaccaacagcggacacctcacaacgtttcaagccccgctggtcgagacctcgactgaaaatgaacgaccgcgccgcttctccatcaggcgtcagggcgcggcctatcaaacgagactgcggatgggagcgacgttcgctcgatagagcgacgacccgttagcgccggaacgcgcccccgaaggaagtttcggtaaggccgcgtatcgggtcacgacatttacgggaggagaaccccggcgagaaccgcaagggcgaggccggttcacggcacgcacggggatggatgccccgcgctggccgcgagcggcgctgatcagattctcgcgaatgtcgccccgccgatacgatgcagacaggaaagggcaatacattcggcgatgtcagcgaggcgaggtgatcgtaaacgacggtcggccttcagccggtgtctgcgaagaccgcatagtctggcatcggatcgatgatgccgtgcgcggccataggagcgagggttgtggactggacgatcgccacgctgtctgctcatcatgcagcctccccgacctcgaacgccttcggttgaaggccgtgcagataggcaacagcgcgttgcgcatgcgcggccgccgcgaagatgaagcgcttctcgtttgacatgacctccatccaggacgcgaggtagctcgcgtgatccgggcgcggttcgagttcgggcacgatgccgaggtccgcgcacaggaagcaactcccgagttccgcgatcagttcctcgcgcgcgcgctcgctacggtccttgccgtagcggctgaggtcgcggttgacacggtgggaaggagcggtccagtgaacggtttcatgcgctcggacggcgacatacgactccgcgtcgcgaaaactttcgagcggtggcatctggatgtgatcggaggagggcgcataaaacgccattatgccgccatgtcggacgacagcgccggtgttagcgaagaacgcgtcggcgtgcgcgttgcgctcgatcggcgtcgagaccgtcgccggccgaccgtaatagtgctcaggcaggccatcgatctgatcgacgcagaagacggtataggccttgaggaacgggacatcgcgctcgacctcatcgccattgccgtccgtctcggtctttgtgaaccgactggcgtaaaccacaacgctgcccgtctcgcctttgcggacgtggccgcccagttcggccgcctgtttgaaggtcatccatgtcggcgaggtgaagccgcgcgcgaccgcctcggaccacaacaggatgacgttcacaccgctatagggttggccgttgtagcggagcggccgagtgatgcggccagcggtatcggcgaccgtccagggctgcgtccatggacgaacgccgcgctcgagatcggcgacaatgcgatcggtgatgcgcgcgtagatgtccgcgcgagatttttcctcttttcggctcatgatcatgacctccgttggaggccgcgcccatcgcggccccgtcacggggtccgcccgcgcaggactgggaggtccgcgcacccggatcggtgcggatcgcagaaccaggattttgttgggagggccgcaacgcagtggaggacggcggagccgttgcggggacaaaccagccgaagcaggaccatcacccgggacggggccgcgatgggtgtcggctggtcttctcttttctattggttttcagattgcagcgccgccgccgcgcgtgacatgcgaaaaggccggcccgcgaggaccggccttttcgtcgggagtgaaaagggcggggccatgccccgcccgaatggctagccgaaagactccatctgaagtttggcggccttgcgaccgacggtctcgccggcgtgctcgatctgccgttcgaacggcttccaggtttcgccaacgatctgctcgtaggcggtgacggcgccctcggccgccatgcggagcgcgtgggcctggagggccatgtcggccgcgaattctcgtttgcgctgcgcggcgctgtcaaaaccaacgggaccgtcgagatcttcgtcgcggctgtcgttggcaagcttggcggtcgcgtcacgcgcttcggtcactgcgcgggagtagaactggccggcgccgtgggccgatccgacataggcgccgacgatgcgctgcaggtggatttgcatggcgcgctcgctcaagccgtctttcagcgcttgggcggtctcaatgatgagccgttcgtggaggtcacagatgccgtcgctgtcgagcgtagcaaggccgaagctctcggagatgcggttggcctgcgcggcgtcgggacaggcgagccggaccatctcgagcgtggtgccgcggcggagcggaacgacggcagcagatgagcgaggagaacgggcggtctttgacatggtgaggtcctttctcggtttcgccgggagaggcgatcggcccgtgccggcgccccctcgggtgcggtcgccaagaaccggcgcaagcggaccgcttcaaggggcgtggaccgtcaaggcgagcatggtcggggtgcggacaagcggggccgcaggccctgcgcaggacgcggcctggccatgacgagacggcgggcgacgatcgactgcgacttgcccttgaagcgggccgtcgacggttcagaccgcagcaaacccgagggggcgccggcacgggttgacgccaaaagaatgaaggccgagatgacctgcatccatgaccagcccggtttactggcgttcgtcgtgctcttcctctacctgccgcggcgcgcgaattgcccacctgcacgccatcttcgcaggctctgctctgggagcgccggtggcagtacgcggagaacggatagtcggagctcaagggtcactcggagagcctggcttgcgctgcagaagcgctggccgatgagcccgcgacatgattagccgtcaatcgtcatggtgcaggctgttggttcccgatctccgagcgcaggctcgatcccgtggcgccgccggaacgccgcaagcgcgctctcttgccgcgtgagcttgcgagtcaacgcgtcgatctcggcgcgccgcgtgagggcaagcgccgctatattttcgcggaaagcccgttcgtccgcgcgtgtccatcttgaggtaccaccgccggactgccggcgcttggtgcaggacgtgatcgtcatgcgctcggcgcgagcttcgatctgccgttcaatgatgccgagatgacggcttgtctcgagaagtgcattttccatgcgcaggagtaaggccgattgaggcgtgagcgacatcagaatgccctccatggccagtggggaaacgctgtcctgtcgggcgcatactcgtcgaggagcgggggacctgcgcgatcgatgacggaatgtcgtcgcccgcgatcgcccagtcgatcgagaccgaatctgtcccggcggatgtgcgcatcccgtccgtgaggacgccatgcagcgcctcggcgacatggccctgcaggtgcggtgatgaattgagcgttcatggatgcctcctgacttttgagggcgaagaaagggatgtgtcaggcgcacgcaccgataagcggaccgcgcacttccaggcgtcggcgcccgtgaaatgacgtcgtaggcgtgggtgccagacgacgaggcgcggaatgccgcggtcctcgccggctgtcgcgcgccatccgaaggcgagggcgatgagttgccagggcatatcgcacctcaccgattccagccgatgaagctcgacggaccgtcgtagagacggtggcgagccccatcaatcacgaagccaaagcggccgacgtgatattcgtcggacggaacgaggtagcggcgctgctcgggggcggctcgatcgccgccgagcgtggcgacgcattcggtcatgccggcgtgctgatcgcaccggatcgccgaaatcacgatccagtcggatgcgtgatcacgttcaaaggcgcgacgatccttctcgtgagattcaccgggcttgaggcgctttccttggatcgcttcccaggcgtccgggtgccaatcgcggatggtccgatccgcgcagcgccgctcatagtccgtgaacagctccggaaaggcctgcgccacggccgcccaggcgcaatcttcctcataccagccgccgcgcgtgcgaaggccgggatggaccttcgcgttatgctcagcatcgagatggaagccgccatggcttgccgtcgaataacagatgactccgtcggcatagatggcatgctgggaagtgccccatggagtcgacgcgcgcgaggagacttcgcgtcgcgccaaggccgtgcgctggcgctggtgctcggcgttttccgcaacacgcgctcggaaagcggtctcgtcttcgacatcaccgccgtgaccgtagaagtccgagcgcttccattcttccatcgggccgcgaagacgccaggccgacgccaggaagaaccggccatccgagccgggcaacaaggcaaacgcacggtcgccgacctcggccacgagcaggccttcatgggtgcgtgcgaacgtgccccccgccggagcacgagttcggttgttcgtcgaagtagaatcggcgaacgtgctcatgcagccctcccatcgatcgcagccgcggcgacctcgtccgtcgtgacgtcttccagcacggcaccgggatagcggtgcgccgcgagccatgcttccgccgcggtgcagtcggcggcgagatagagcagctcggccgcctcgccctcgcggtcgagaacacgaaccgagccaggcttcggaggttcggtcacgatgaacttgagggcgcagttgaccgagaaggtcttgtagaccctgagaaccacgacgccggcgctgccgaaatcgccctgatgcagcgtgatgccggcgagtagaaaacagctcggcatatcgcgagacggagttttcttgaccagtctcccgccgctgttgttgttttcccatgcggcaagcttgcgcttgaaccgtgcgggtggcctcggtgtgccgtctgaatagcgaacgatcgagccgagtggagcagacacgtagatgtgttgtgcggacatgatgtcctcctgtggggtttgcgaacgaaagccgccgactcgggggagccggcggcggggattgatcggatggaaggtgaggtgcgggtcgctattccgccgcttcagcgtatccgtccgccggcggcacgtcctcggcctcgttggactcgttcaacgcgtcagctccggactcctcgtcgtcttcggcgcggccgtgtttgtcggcccaagcggcgaccttctcgggcgcgggagcgaacaccgcggccggatgcacgaaccggatttcggcgtagtgctgaaccagcgcttcgcgcgtgtccttgacccgttggcgcggaagcaccggcgtgtccttacacactgcctcgatcgcggtgcgtgacaggcacgacagaaagtcgtccgtagccatgttcggcaagaacgtatctgcgccgatagcgtcacccgcgatgtgcgccgcgacgccgctgtccgagcgattctcccggcacgacagcacgtcgatcagggtcgcacgcgcgacctgttgcagggtgtcgcgatcgaaggcgagtttgccgtcctccccgatcagtcgcgcggcgtgtcggctaatctgggcatagccgtcggcgttaccggaggcgatggagacgttctggccggcgaacgccagcacgagcaacccgaggagcgtgtcatcctcgatcggcgcccgggcgagggcttcatgaagggcgtcggtgcgcaggtcaccaatcatctccatgcccttgcgcgtcacgtcgggccgcgccttcgccgtggtttcgatgtcgtcggctgcggcctcttctgtctcgccggctttgcccttcgccttcttcacctgcggcatgcgataagcgacggactgaatctggccgtcgcgatcgagataccagccggtgcagtcggacttccccggcttgccccagacccgctcggatttggccggcagcttgggctggccccactcgttcacctcgatcaccgtgccgcgcttcggcagatgattggtcatccactcgttctgcgcgccgaggaaggcctccacggcggtcgtgtagcggctgtcctcatcggccggcgcgaacaggtcctctacccatgtgatgccataggccgtggcaagctcgtcatcgaagctcgcgtggcgggcatacatgcgcgttttggtgagcgcgcgggcgacgtcgttccaggagacctgcggatcggccttccgcggcttgtatttcttccagacctcactctgctcgtcgatcgacgccgcggcgatgacgcggagctgcggctcgccgggcatgtcgcccttcgccatctggtcaagcatcgccgggagtacattcgcgagcagcctgagcttgcggacctggcgcgcgggcaaggcgagcgccagcgcgatcgactcctcggtccagccgagcgccaccagacgctcgatcgagcgccagaggtcgacggggttgagcggctcacgcgcgacgttttcgacgagggcgcgcatcgcgtcgtgatctccgtcggggttcgcgacgagaacacggatttcggcaaggtcagcggcgatcgcctgcgcgacgcgacgatgcccgaagtgaatcacgtagccgttgccaccatcgcactccggcaaaatgacgggcggctgcacgatgccgacggccttgatcgatgccagcagcaacgcatcggcctgcagcgaagatttcgagcggcgcatctgatcgggattctccttcagcgcgcgcggatcgaccatcatcagttccatgggatgctctccattttcaggggttgtggaccacccgttcggggtcctctcgtcttcttctcgaagacatcccttcggcccgcagggcgggcggagcggcgcaactgccgccgagcatccctgcccggcaggcgcgagcggggcgcgaagcgccttgcgagcgcgccgcggccgggatcgcgagacggtcggttgagcgccagcggcggcgctccggctgctctgcgagcaggtttcctgctcacgcagctcttcggttttcccctcccttcgtctgcgccgcttcatcgctgctggccgcgagatccgcctcaacatccgcaagctgcgcgcgcttgagattgagctcggcggcgaaggcgtaggcttcgccgactcggccgcgataggaggcaaggcgccgctcggcttcggcaagacgccgacgatggttctcctgctcacccccgaaattcgtcagcgggtgctcgagccgagcgactgcgccgagcggcgtcacggtcatcgggagctcgatctcgaactgggcgccggttcgctgcagcatggtcacgtagtgatagccatctcggccgatacgctcgccctcgaacgtgacgtcgaagccgccgatcgaggcgatcaccacgccgtcttcgtgttgaagctgaacgagggtgaggatctcctgcatcaaggcgcgaccagcgagcttgcgctcgtcgaagcgcgtccctttgacggccatcgtgaaggcgtcgccaccagtcggaacgagacgggtgatatcctcagcaatatcgccgatgcggcgcgtcgagatctcgatctcgcgctcggcgtcgcgaatttgccgccggatcgcatgctgatcgtcgatatgcgccgcgtgcaggcgttcgaggcgggcgatctcggcctcaagtcccgccttctgcatgaggcgtggatcgccggacgcgatcgccttggccatggcaaactgattggcctggccttcgcccaggtccgcgaggcgccgcacgctcgtatcgcctgacagcgcggcggcgatgaaacgggctttgcgctcattgttttgccacatggtggcatcgaggctgccaagcgtggcataggcgaagatttcgacttcgtcatgctggttgccctggcgcacaatacggccctcgcgctgctcgatctgcgaggggagccacggcacgtcgagatggtggagcgccttgaggcgaagttgaacgttaactccggtgcccatcgtatcgctcgatccaagaagaatgcggaccttgccggcattgaaatcattaaagagacgctgcttggcctcggacttcctgtggtcctgcatgtaggcgatctcggaaggcggcacgccgagacgcacgagttcatcgcgaatccagcggtacgcagaaaaaccgcggctggcctcgacgctgatggtgccgagatcagagaaaatgagctggccggcgccggttttgtcgaaggccctgccgtccttccgcagataggtcacattgctggtctcttgccagatgcgaaaagcattggcgatgagggcgttgagcttgttgcccgcttcgttcacctgtccggtaacgacgaggcgcaggtcgatcgcggcgtggcggccgtcggtgatgacggacaggaggatatcgtcgcctggttccggcgcgcggtcccgctcctcgatggccttgatgcggtcgtcaagcaggcgttgataggccttgaaggcggctgtcgcctcggccgtgataatctgccgtttgccgcaggcgatcgcgggcactttgacgtagtccttcagatcgtcgggcaacacgacatccgcgaaggaacggaacatcgcgatcagctcggggacgttgacgaactgcgcgaaacgcgtgacggggcggtatttgccggagggctgcaattcaagctcggtcgaggtgtcgccgaaggtcgaggcccaggcatcgaattcgtgcaggccgcgctccgcaagtgcggcgtgatccatcagccgctgcacggtgaacatttcgccaagcgtattggtgatcggggtgcccgaggccaggaccagtgcccgccctggattcttcacatcgaggaagcgggacttcacatagaggtcccaggcgcgctgcgagccgttcgggtcgacgccgcgcaagctggtcatattggtggcgaaggacagttttctgaactcctgcgcctcatcgacgatgatctggtcgattccgatttcggcgaccgtcaacaaatcgtccttgcgcgaggccagcgattcgagacgttcctgatgaccctccttcatccgctcgatgcgcttgcgcgacaggcggtcctggctgtcgaccttgccgaggagctcttcataggcctccaactcgtcctggatcatctgcgcctcaaaggcggacgggacgggaatgaacttgaaggcgctgtgggtgatgacgatcgcgtcccagctcgccgtggcggcgcggctgaggaagcgatggcgcttctccttcacgaaattggtttcatccgccacgaggatgcgggcgttcggatacagggcgagaaattcccgcgccgcctgcgccaggcagtggccgggtacgacgagcatcgccttgttgacgaggccgaggcggcgctgctccatgaccgcagccgcgatggacagcgtcttgccggcgccgacggcgtgggcgacataggtgcttcccgaagcgatgatccgccagatcgcccgcttctggtgcccatatagagaaaaggcgccagaggcgcccgggagctgcagatgatccccgttgaaatgtcggggcacgatgttgttgaaggtgtcgttatagagccgggccaaccgatcggttcggtccggatcggaccagatccatgactgaaacgccgacttgatcttggcgagtttgtctttcgctgcctccgtctcgacggtgttgagcacgcgccgctcgctgtcgccgtccttgatggtgtcgaagatctgcgggatcgacgagttgagcgcgtctgacagaagaagtccggcgtggcgacgatgggtgccccagtcggtggtgccggcggcgctccattcgagctggcgcgcattcacggtccagcaggcgagctcggacgtgtggtggatggtgatgtcggcatccatcgtctccttcacgaaggcgatgatgtcggcggccgggatccagggggcaccaagccgcgccgtgatgtcggatggacgaaggtcggccggctggacgcgcccgagcgcctcgacgttacgcgcataggccgggtcgagggccgcggcggcttccgctgtggcgagcttcgagcggaccgcaccggagagatagccgtcggcggtgtgccacgcgccggtcgcgggatcgcggaagatggcgtcgccgagttcaccgatcacgtcgtcgacgccgcggtgcaaaagctccgcgatgtgatcgggatcgaccgtgccccgctcgttcagcacgacggcgagcgcgtcggcggcagaggcgatgacaggcgccggtggcggcgcaatcacgcgctcagtgaagatcggcccgggtctcgccgtgttcgtctcgaggtcatagtcttcgatcgaagcgacgagccagcaatccgggtcatccgcgaacggagccagattgggccggcggtgcgtctcgcgcacttcaccggtctcctcgtcttccagggacgatacgaccgtggtgttgatcggcccgaagtcgcggacgaaagagctccaggcgatgcgcaaccggacctgcgcctgcttccacggatggtcggtctcctggcacttcaagatctcgcgcacggcgtcgcggatcgggatcagcttgcgaatgatccgcgcgtgcttggcgaagacgccgtcggcattcctgcccttcttcacaggaatgatgacggttgtgccgtcgaccatctgcatcaaggccatgttcctgccgacgaaataacttccttcacggatgctgacgccggcggcggttgcgacaaccgtctgcgtctcgtcagcatcgaagccggttgtctccgggtcgccgtcgtagatggcatccggaagatggaggatggtggcggtaagcgcgtcttcgagcacgaccgtcgggcgcggtacgcaagtgtacgtctcaccgtaggggccagacgcgagtgcatgctcaccgagcaccatattcggatgttccgcgaaatggcggttcacccggatagcgccctcatgctccgttgcgggatggatttcggcgtgatcgagccaggcgtcggcgccgggagcatcgccatcgcggcgctttcggaagaagaggatatcgacgccaacgtcggtgccggcgtcggcgcggaagctgccctcgggcagccggacggcaccgacaagatcggccgttccggcgatgtgctcgcgcgcggacgcgtccgctttgtccatcgtgccatgcgatgtgacgaaagcggcgagacctccgggcttcagccggtcgatcgccttgacgatgaaataatcgtgcagccgaaggccgagggaccggaacacccggtcgctgcgcaccgtgcgatcggaaaacggcggattgccgatcgcgagatcaaagtgctgggggagttcggttcgtgcgaagtcctggttgatgatgttggcgcgaggatgcagcaaggctgcgatgcgcgcggtgaccggatcgagctcgacgccggtgagatagcacgccgcgcgtagtttctcgggcatcagcgccgaaaacaggcccgtgccgataccaggctcgagcacacgtccgccacgaaagccgagccgcgtcacgccggcccagaccgcgcgcacaatgtattcgggcgtgaaatgggcgtactgggtgcagcgggcgagcgaggcgtagtcccccgcgccgaccgccgattccagccccgcgccgatctcctcccaaccgtggcggaaatcatcgtcgcccgggcgcctgaaaacgccattggcgagttcggatgcgccgaagccggtgaagcgaatgagctgcgcctgttcggcggcggtggcgggacgctgatcgccttcgatcacggctgcaaggcggatggcggagagattgtcgcgcgcccgatcgcgccaagatctggcaaggccccgcgttccagcgaggtagaacgtctcgcccctagctcggctggtgggtcgatcagcggacggttctatacgcgcgaccgccggagggtgcggcgcatcaccgtcgtcgccgtccgtttcaagggtggatggaaaggccgtgacgccaaggtcgagccccgaagagagcgacgtgttgccgaagagatcaagcgtaaacggatcgtgttgcgccatgaaaggctcctgtcgaacgggcgcacgcgaacgtcccgccggcagcaggcccggcaggcgacgcgattgcgtgaaggtgaggggtgaaggatcggctctgagcggacgtcagagccggaacgtgcggacgagatgcttatgcctggcctggcaggccagcatttcggaataaaagcgcttgcgcgcctgcttcagcgccggatcatggcggtgttgttttgcgatccgcgatcgcgcagcgcgcacgacggcacgccaaggggcgtgaacgtaaactccgaggcgggagtaggtcgcttccatggacggaccccctctcgctcacgctgcgaccggctgtggcaaatgacgcagctgcacggggagcttggcggatacttcgtcgtccgtgaggtcgtcgagcagtttcaggacggtgcctcgatcaccgccatagaccagaacggttcgcttgccgcgcatagcggcaggccagcgctcgcctgcatagccgcgataatcgtcatgcgtgcacgaccagatgtgctcaagccgttcttcgcgggtcatggcgcgcaccggccgcgtctcgcgatcgacgatcgcggccttcatgcgatcgggcgagccgcgatcggaaaggtcgcaataaccgtgaaaccaccgggtgcagccatcgattgagagcgcgaagaagacactggtgacgctgccggtcatatattcgctgagcgcgaacatgtcaccgcgcatgaacagcggcggcaggatgtcgagcatatactcgtagtcgcactcggcgatctcgaaccactcgccggcgaacagatcgcccgcatcgccgtcggccaaggcgggtgcgccgcgatgacggttgaacatgtggtgcatctcgtggcgcgacgcgacgccttcgaaaatcttgcggattgcggatgaggtgtgcatgagcggctcctggcctgttgcggctgaagcgcgggcgatccgcctgatcccctcatcacttcagtccttcgtcacacctctcgggcggccgcctctccggtccgacgggtcaagggccgcggaacgcgggcgaagcttcacccttgacgcgccggccgggcatgcggcagcggggttttttgtcctttctcccattctctcttccctccttcacgcgcgggaccggacaagacagtggttgtgcgctcacgccgccaccttgacgcgccgccaccaagcgatccgctcatcgcgcgtcgcattggcgagccgcagcagcagatcgccgtgacacggtcgcggcgcgcaccagcagacgagatcgcgcccccgcaactcgtccagtgcgcgcaagagctgatgctgatccgcaagccagcgctcgtattttgctatcactgctgagcgatcgccgtcgggaccgatccggaacggattgccccacttgctgccgcgcccgatatagaccgcgcccgcgggcacgcctgcgtgatgcttgttgagaaccctgcacatcgacagcgcctttcgatctccgttgcggtggacgcttcgcaggacgggttcaacgagggtcaccgatcgcgtgtcgcgatgggaaacggcttgcccgttgactggagagccgccgcgtccagcacgtccgcgaccgatacggagatcgccatgcgcgattcggcagggtttgcagatacgacaagcgcgctcgctgcgccgtcaggcggagcgcgcatgagcctcgtcagtccgggtcgcgggagccggcgagtattgcctccgccttggcaatcgccggctgcgcgcgctcgagccggaaggcgcggtcgagttgctcggtgtcgctttggctcgcgagaaccttgacgaggccgagcagcacctcaaggtgcaacgcgatgcgctgcggcgtctcgacatagtgagcgggaatcggctgtgcggctccggtgtaggcggcattctcgccagaccagatgcccgtcacataggtctcgccggcggactcgtagtcgcgtttttcgtcagaccattcgtcgtcgtcgacagcgaggcgacaagcctcttccatcgtcgcggcctcgtaggtctgctggcgatagaccggcaggcgataggtcgtctcaatcgtgaaagaaggcatggttggcccttccctttgggtgttgcaaacaccctcgggcggccgcatctgcggtccggcgggtcaagggccgcggaacgcgggcgcagcttcccttgacgcgccgggcgggcatgcggcacggacctatgcctacccttggcgtcctccttcgcccccgctgttgcccgcctcacgcggcgcaaaggtcttcgttccaatcgtcggcgcgcggccgggatcgtgcaaaacgggatccggtttcctccgcgatcgaccgaattcgcccggcatacacctcgccctgccgattgttatcggtcgcggccaccagcagcacgttggcgcgcccagccaaggcccggattgcgtcctccgtcgccggagcccatccgcctcccgtgctgacgtagagcgtgtcatcacgcagtttttcgagcgcagctaggctcatggcgtcgaccgccgcttcggtcacgcagacgcgtgcgcaatcggaagcaccgaggcgaaacagctccttggcgccgccggtcgcaaagccgcgccagctcgggccgcgctcttcccagccggtgacggtgtcgcgggaatctgtgtgcgccgcccacatgctgccatgcggaccctcccgaagccggccatgggcaacaataccggcgatgatgcgatcggggatgtgccgttcgtcggtcagataacgccaggtcggggagccgggccgaggcacaaagcgatgtcgccaacggaccgcgatcgagccaatcgccttcggcttggcaggacgttgccagaccggtgcgctcgggatgaagccgacgacatcagcgacacgatcgcacgcgtcggtgaagccggcggcaccgaggtgctcggcgagcgaaaacacgtccccttttgcggtcgacagcggatcaaaccagccgcggccgtcatggatgacaatcacgatcttgctgtcgcgtcgatatttgatcgcgcggcgggtgctttccttgatgtcgactttccagccttctttttcgagcagggccgcgcagccgaccttttcgcgcaacccttcgatttctcttttgttcatcttccttcaccggactcgcgcaggcaagtccgccctctcttgcgttggtctttcttgctcctagccttgcggaacgttcctgaccggccgcgaagcctgccgaatgcaagggcgcgctgaccaacggtcaattgccgcatctggtgcgcggcgaagcctcccttgcagccggcaaggcgccagcggcagccggtcacccggctcaatgagccggggtccacgggtcgtattcatgaaggatggcgtcctgttcgccgtcgtattcgctggagaccatgacgccgaattcgttctcagcttggaaaaggatgaccggcaccagcagcgtgcgggccaagtcgaatgcatggtgctgagcgagcgtgagattgtgcgacattgaaaggctcccgtcttgcggcggggaccatccccgctcgacaggcgccgaagtgttcgggggcggctgcggtcacctcgcaggcgaagccgaagaggtcgcacgcttgcgtagcgaaccccttgcgggttgatcgtggaaggccgcgcttgaaccaaggaaagcccattcgagagcggggtggtccttctccggaagtgggtgtgccgaactgtacatctcccgccggtgagtccatgccggcgacatcgaaaccgagaaacaatgtgatccttcttccttgaataagcgaagaatgcggtacgatgggcgcgaactagctcagatcaggttgacggtacgccgacggcgcggtgaccgtagagctgacttgatattgctcgacccgatggcttgtgaccgaccaagcaacgtgtggaaggagcgaccagagtcggggcttaatccgatcggcgcggcaagcggttgtcttcgaccaggtcgaagaagcgagtgaattccccttgaaacgtcatcgccactgttcctgtcggaccgtgccgctgctttgcgatgatgacttccgcctggccgcgcgcgtccctcatctcggattcccaagtgagatgctcgtcggtgccgggcttcggctctttgttcttgagataatactcttcgcgatagacgaacaagacgacgtcggcgtcttgttcaatcgagcctgactcgcgcagatcggagagttgcgggcgcttttcgtcgcggttttcgaccccgcgcgagagctgggacagcgcaacgaccgggacgttgagttccttggccagcgctttcagacccgtcgtgatctccgtgatttcctgaacgcgattctgcgtcgcgcgctgcgatctgccctgcatgagctgaatataatcgacgacaatgaggtgcaggcctcgctgtcgtttcagacggcgcgcgcgggccgcgacctgggcaatggagagcgcgcctgtctggtcgatgaagaggggcagccgtcgcattttctggcggcagtcgaggagtctgccgaaatcggtctcgccaatgtcgccacgcctgatgctcgaggaggggacttccgcctgttcggagagcacgcgcgtggcaagctgttccgacgacatttccagtgagaagaaggcgacgatgcccccggcgacgggccgtggcgagccgtcgacctgttctgtcgcgtcgtaggcgcttgcgacgttgaacgctatattcgtggcaagtgacgtcttccccatgcctggtctgccggcgatgatgatgaggtccgttggttgaagaccgcccattttggcatcaagatccttgaggccagtagcaagccccgagagcctgccatcggactggtaagcttgcgcggccctgtcaatggcgttgtccagcgcggtctcaaacgtctcgaagccgccgccatagcgtcccgtttcggcgatttcgtatagaagctgttcggcatgctggatctgatcttgcggagcgcaatcgacggccgcgtcaaaggcgtcattgagcatgtcctcggcgatcttgatcaactcgcgtcgtaccgcgaggtcgtagacggttcggccgtaatcggcggcgttgatgacggtcgtcgcttccgcagccaggcgggcgagatactgcgcagccgatagtccggcaatatcgagcgctgctggaaggaacgtcttaagggtaattggattggcaattttgtttgagcggatcagctcgctaatcacctcaaagatgccaccgtgcagaggctcgaagaaatgattagccttcaggaaatcggcaacgcgatgaaaggcgtcgttgttgatcagcatggcgccgagcagcgcttgctcagcttcgatgttgtgcggtggctcgcgatagtgtggagcttccaacggtttcagtttgaatgctgcttctgacacgtttgtccgtccgccgagccaatgttgaagtgcaggacctactaacaacaaaggaccatgcaggggatgggcggcgaatcgcccacccgtggagaagtgtagcgccaacgcaggtaaaaccaatcgattcgccagatcagggcagccttcgcggctattgggtcaagcaaccgctcgcgtcagggatggccgcccgcgagggggaagacccgcatgcggggcttcagcgcagccgccagcccggcccccgaggggggacgcccaattgctctctcgacgaacccgcaaacacagataatgggggcatgcgcaacaacggtgagcggcacatcctgtgggccaaattgatgcaggcgccggagatcggccaatgacccagacccacgcatagcttacggcaataacccctgacgaatcgcaagcgcaacggcgtggggaagggacaatgcggcaagatttcgccgcgcgttgtcgagatggaacttcacaccccgcggtgtgacgtcgagaagtgatgcaatgtcttgcatcgttttaccctgagatatccatgcaaggcactgccgttcccgctgcgtcagcgcggtgcccgtctgatcgttcaacgaggctcgtcccatcctggcgctcacatgcgcatggtaggtaaggccgatcatttgcaagagatcctgggaggtctcaacaaaacggtcgagtccaaggctccggtcatctaccgccagcgtaaacgctgcggattgtccgttgccgccgggaatccgaaccgtcaaacctgtcctgatcttgaaactgagcgcatcgtcaaacagacggcgttctcgggcggatttcgcagatcgcgcagctcgtccgtcccattgaaacacccggcatggggtgaggggcttctgcagaacaggatcgatctcatcgtattgttcatcgaagtagtgatcggtccaacttttcggataggacgagatcagattgggggcatccgaacggcgcccgaaataagcaaaccaccggaatcccaatgcatgcgcggtccgctccgccacgcgacggaaatcatcttcggtgcgcgccgtgtgaagacaatcgacaaattcatggcaggccctttggacatctttcatggcgcctctcaatcaagtttatatctattctaacgcgacaggacgcgactacgtcgaaactcgcgccctgcgtgtgcgccgtctacggcgaccttacggcggctttggggcaggccggtgttccccacacccctgtcgaaactgacagcttcaagcggtgaccgctcctgatttcgtggatctcgaacctgtgattcgcagctggagatcaagaatgaatgtcatcgcactcacgcgtcctgcgcttttgaggaattccgcactggcgctcgggatgcacggtctgcgacggcgcgtctttcaagaccggttggaatgggaagtttcggtgtcggatggacttgaggtcgatcaatacgacgtgctgtcgccgacctatctgttgggtattgataggcgggacgttgtcggttgtgtccgcctgctgccgaccaccgggcgcaatatgctggcggatacgtttccggtcttgttggacggccgggctgcgccaacaaaccccagaatttgggaaagctcacgtttctgcgtcgatacacagaatgtggcggccacagccgagaatggcttgagggaagcaacgttcctgctgtttgcggcgatgattgaatggggtcagcaaaacgaccttcaggcgatcgcgaccgtcactgatctgcgaatggagcgtatcctgcgccgggccgggtggagtctcgatcgcctcggcgagcctcgccagatcggagccaccaaagccgtcgccggtctgttgccggtaaccgatgatgctctcgcagcaatccggacggcaggcaatatttccaaaccagtcatcgaaactccggcgtctttcgctttcgctgcctaagcgcaagcgtcgattttattcctgatcggaggctgaagtggatcccgccgcattcgctacccttgttgaacgatgtgcatcgcctgccatggccgcgcctttgaccgcgatcgtacaacaagcgagttcgttcgaaccctttttgatcacccttggcgagcgcaagccgatccgccttcaggctaccgaccgaaatgaggcgatccagcttgcgacggaagcggcggcgacgggcaagcccgttcgaattggccttggtcaactcgatcgcgaagagatgaagctggcaggtctcacgatagccacgacgttcgacgcttgccaacatgtggcaggcctcggccgattgtttcaggtccgatttcaaacggcgattgaggacagaggcggttctcacaaagcggcattcgacgctatcaagagctttgcgatgaaggacaagcccaccatgccccaggtagggtcacgcgcgccctcgcaacctcctgccgacgaacccgctgcgaacttatcctccagtaccgatctcgccagggagcgcccaagctgggacgtctatcgcgcaggtctcggcatgtcagcctttgtgtatgggcggtgactcgtttgctcaatctccaaccacacgttcgagccggcctggtccggccgcaacactcctaggaactcttcacatgccctctcgtctcaagaaatccgccgcacttctttgcatcggtctcgttgtcagcatcggactggccgaaccggcgctggcgcagaccgcgaatatcgaaggcgtgctgcagaacatcgttaccatgttgaccggcaacgtcgcgcggctgctggcgacactggcggtcatcatcgtcggcatcgcctggatgtttggttatctcgatctgcgcaaggccgcctacgtcgtgcttggcgtcgccattacgttcggcgcctccgaggtagtctcgaccttgaccgggggtcgatgaagatggtggtcacccatgactgagcccatgcgtctcaccgaggacactttattcctcgcctgcacgcgtccggccatgatcgccggcgtcacgatggaggcgatggcgctgaacgtgatgttctcctgcatcctgttcctggtggccgggagcattttgtacggcctggtcgcgcttccgatccacggcctctgtcggattatctgccggcacgatcccaacatgttccggattttgctcgcctggatcgagacccggggccgcacgcgcaacgccctgttctggggcggatcgtcctgcacgccgctgaagctggttcggcgttatcgagcgagggattttggttatgcgtaacgcagcggcgaaagctcgcgagatcgagtccgatatctatttgccgttcgcccggcacgtgaccgatacagtgattagcctctcgacccgcgccttgatcacggtgatccggatcgacggcatctcatttgagacggctgaggcggtcgatctgaatgatcttcatgccaaactcaacctcacgctacgcaatatcgccgacgaccggctggcgctatggtcttatctggttcgtcgccagacatcggattacccgagcggcaccttcagctcgacattttcggccgcgctggatgcgcaatatcgcgagcggcttcggagcgaagcgctgtttcgcaacgacctctacctcacgctggtatggcatcccggccgcgcgacgacggacgcggcggcagcgttcttcaagcggctcggtcgtgccagccggcgttccgtcgaggttgacagcgaagccttgaaacggctcgacgatgccaagcgcgacgtggtagcggcactcgagcgttacgatgctcgtgtcgtcggcttggtcgatcgcgacggcatcgtgttttcagaaccaatggaactgctccacgccgtcacctccggcgagtggatgccaatgccattgccgcaaggaccgatcgggccggcgctctactcgaatcgcatcatcttcggccgagaagccctcgaaatacgcagcgctggcggatcacgcttcgcgggcatgttcgggatcaaggaatatccggcgtccacccggccgggtctgctgaacgcactactctcagctccctttgaactcatccttacacaatcttttgcctttctgtcgaaggccgacgccaagacggttctgacgcgcaagcagaaccagctcgtctcggctcaggatcctgcggcctcgcagatcgacgaactctcggacgcgcttgacgatctcgaatccaatcgatttgccctcggtgatcatcacctctcgctgctcctgtcagctgatacggcttcgcagttgcaggggcacatgagcgtggcgcgtcgcgcgctggcggacgcgggcgccgtggtcgcgcgcgaagatcttgggcttgaggcagcctattgggcgcagcttcctggactattcaaataccgggcccgcgccggcgcgatcagctcccgcaatttcgcagcattctccccgttccacacctatcccgtcggaaagccagacggcaatcattggggaccggcggttgcgatgctcaagaccgcttccggttcgccgttctacttttcatttcatcacggcgacctcggcaataccttcatctgcggcccgtcgggatcaggtaaaaccgttgttcagaatttcctgctgtcgcaggccgagcggctcggcgcaacttatgtgttcttcgacaaagaccgcggcgccgagattttcatccgtgctgccggcggcacttatctgacgctccgcaacggcgtcccaaccggctgtgcgccgctcaaggcgctggagcttactccggcgaacctctcctttctgggcgaactggtccgaaagctggtcacacccgacaaccgcccgctgaccgtcgccgaggaggagcggatcgattccgggttgcgcgcgcttaaccagctccggcaggaggagcgttcgttcggcgcattgcgcgcctttctcggtcaacaggatcgcgaggggattggtgcccggctcgagcgatggtgccgcggcgctccctacggctgggtgctcgatggcgaccaggacgccatcggcctcgacgcccgttccatcggcttcgacatgaccgatctgctcgatcacccgaccgtccggacaccgctgatgatgtacttgttccacagggtcgaacgtctgatcgacggccggcgcttgatcatcgacatcgacgaattctggaaggcgctgggagacgaggcgtttcgagatctcgccaacaacaagctcaaaaccatccggaaacagaacggtgtcatggtgttcggtacccaatccccccgggatgcgctggcctccccaatcgcacacaccattgtcgaacaatgccctacccagattttcctgccgaatgcgcggggaacgcgatccgactatgtcgacggcttccacctcacggacaccgagttccgcctgatcagggaagaactcgcgcccgaaagccgccgcttcctcgtcaaacagggtcacaactcggtggtggcggaactggatctcggcggattcgacgacgcgctcgccgtgttgtcgggacggacggaaacagtcgaactgctcgatcgcattcggcaggaggtcggcgacgatccggcccaatggctgccggtatttcacgcagagcgggggaaagttcgatgatgcatcagcgcatgtcggtgatgttcgcgtccgtgtcagtcgtgagtctcctgatggcatcacctgcaggagctgagattgtgttcgatcctaacgtctttgcgcggcaatttgagcaactgacggaactgaagaagcaagtcgatacgctgacatcgcagctcaaggtggcgcaggatcagttgaaccaggccaagcagctctatgacagcttcaacaagctgaccaataccaacgacattggcgcactattgaacacaccgcagtttcgtaaagttctgccgcaacagttttccgatatcgaaaagctggtggcggggcagggcagcggcaacttcgcaaactcaatcaatcagtatctctcgcaaaaccgcgcatatgcgggcaacagcggcaattcatattaccagagcgagctcgaccggattgcccggcagaccggcgccaagcactccatgggccaggcagtctacgacaccgcttcgcagcgtatcgatgcactcgaagaactgagaactcgcatcagctcggcgaccgacgtcaaggagatcttggatctgtcggcgcgactgcaggccgaacaggcgctcctgcagaatgacgtgctgcggatgcagggtctggcgatgatccagcaggctcgcgtggacatggatggacagcgggagcgggagaaacagcgacaactggtcgatgagatcaaggcagccctacaatgagaaagacgacttttattctactgttgctcgccgcgacaatcagcctcacgggctgcaacgaggccgacaccagtcatccaccgaaaacagtcggttggtttttcgaacatcgcgacgagcttgcggtggctctcaaggcgtgccgcgacaacccgggagaactcgcaaagacgccaaattgcgtcaacgccaatgaagcccgcaacaaggtcaccgtccaagaaatgaaagacgccctgaaataaggatcgccgcgatggccgttaacgtcttcgacagcttcttgaaagagttcgagcaaccgatcacggcattcgtgtcgacctcggtatcgaatctcgcttcctacatcgatggtccgctgcgcgccgccgtgatgctctacgtcatcctttacggtttcgcggtgatgcggggcgcgatttctgagccaatcatggagtttgcctggcgcgcaatgcggatcgtggttgtggtgctgttagcgacgaactcgagcacgttccaacagtacgtaacgggattgttcttcgactctttgccgaaggagatcggcaatgctttggcggggtctggactgaataccagttccggcgctccgttcgatcagcttctgtccaaagggattgacgttgctaacaagatctacgaccaggccggcctgaccaacatcgcacccgcactgattgctgccattctcctggtctttgtggccgtcggttcgttcctgcaattcgccattctgctctacgccaaagtgggtctcggggtcgtgatcgcgctcggcccggtattcattgcgctgggactatttgaggcgacccgcccgtttacagaggcctggctccgacaggtcgcgaacttcgtgatcctattggtgctggtggtcgccctcgtcgggctgatgttaaccaccgtcagcggcttcatcgacaggtttgcggcaaacgccggaacagccggcgagatggtggtggctgcggtcgctatcagtgcggtgctcggtctctccggttacatcgcgcttcaactgccggtcatcgctggcggtctcgccgggggtggcgcgtcactcgcaagccggctggtgacgagcccgctaatcgccaataccacggccgcagccggcggcgcctatgccggcgcgcgcggggcggccagtcgcggtctcgcggccatgcgggccagccgtcagggcggcagcatgcggcgcactcgatcgcagggggcaccggccgcctagacgaccaaacgacatcgccggcatcaggccgaccagggaaatcaggggcataagaagaatgtggtaccgactctcaattgtgtgcgtgatcgggatgcagcttggaggctgcgcgatctggtccaaggcaccaccctcctgtgacggtctggcccggcggccgctcaatcgttcgttatgggactgggaaaccggcacgcctttggccgcgcctgagccgcctatcacgccatccgcaccgataatgcgcaaaggcgacagcagcccaccagccccagcgacccacttggccctgagcttcgcaccaggcgacgggaccgacatagcctcgtcctaccgcccgtgcggcaaggagacatgagatggttcgtcaggatgatctgaaaacctatttcgagaacgcacggcgatgggagcaggatctgttgttgtccgcccatcgctcgcggcgagtagcctgggtgatcgcagcgggtgcttgtgccttggcggtcgcctctgtcggcgcggtcgcagcccttgcaccgcttaaaaccgtcgagccgttcgtgatccgggtcgataatgccaccggcatcgtcgagacggtctccgcgctcacatccacatcgtctcgatacgacgaggcggtcaccaagtatttcctcgggcgttatgttcgggcacgagagggctatagctacccggaggccgaaaccaactttcgcacgatatcgctactgtcggggcagggcgaacaggcccgtttcgcggcctggtatcgcggctccaatcccgaaagcccgcaggtcgtgcaaggccgtttcggcatcgccacggtgcgcatcaaggcgatatcgcttctggccgacaacgtcgcatccgtgcgtttcatgaaggagagccgtaagggcgaggaaacccgcgtcacccattgggtctcgaccctgacgttttcctatgccaacgcgccgatgtcctccgccgaccggctcatcaatccgctcggctttctggtttcggaatatcgcgccgatccggaggtcgtgccatgaaacgtcttgctcttttgatgatattggtgcttggcattgcgagtcctgttatggccttgcaacaaccgtctccagggcaacgcgatgcgcgcgttcgaacggtaacctacgacccggccaacgtagtccgcctcaacggcgtgattcgcgcctcgacccaggtcgtgttcgcggatgatgaggaggtggcgcatgtcgcgatcggcgacgcggtcgcatgggaagtcgcgcctgcgggttcgatcctgttcctcaagccgcgcgaaaagcatccgccgaccaatctgcaggttgtgaccacccgccccgacggccgcaagcgctcgtaccagttcgagctgtcgatcgccgaaaccacgctggcggacagctatttcgtggttcgcttcgcctatcccggtgacgagattgagcgccggcgcaccgacgccgcagcccgcggcgccgagcgcgaaggcgccctgatcgagcaaacgtttgatctgcaccatgcctatggggcgcgcaactggcggttttcggcgcagggctcgatcgatctcgagccggaaaccgtgttcgatgacggcaaagagaccacattccgctttgcgggcaaccgcgaaattccggcgatctacctgatcaactcggacggttctgagagtctggtgccgaaggatgtccgcggcgaactcgtggtggtccatgccacggcgaagcagtttcggttgcgcaaaggcaacgacgtactttgcatcttcaacgaggcctttgacgcggtcggtgtcaatccaggcaccaacaccaccagcccgtcgatcgagcggcgggcgaggaagtcacctccatccccaaagtcacgataggcggcgcgatatgaccgagattcaaaatgaggcgctgcccgatgaccgtggcattactcccgtgggaggaggggataacggtcgaacggcgatgctcaagcgcggcttcggcgcgctggcgcttaccgcgttcgcgtttctgatcatctgggggacctggaaaggcgacaagccggtcaccgattccgcccgtaagctcatgatccggcaggctgcggcgttcgaacccgtcaaggaggcgccggcggcgccgattaccacggcgtccatcccggtcgctccggtcgcggccgtgtcagcggcatccgcacccgctccagaccagatgctcgaaagcgcgcggcgcgcgccagtattggcctataaccggccggtgtcggctgcacatccccctcgtgacggcgtgaccggaagcatcagtaccgatccctacagttttgggcgaggcgagccgcgcaatgaccttgccgacaagctcaagcctacgccaatcgaaggggtacgcgcggcgcggcttcccaatcgcaacctgctggtcacacagggaacgtcgatcccgtgtgtgctggagacggcgatgtcgtcggacgtggcgggcttcgtctcctgcgtcgtcatgcgagacgtgatgtcggattccggcaacgtcgtgctgatggaaaagggcacccaagtggtcggcgaatatcgtggcaatgtgaagcgcggctcaaaacgcatgttcgtgttgtggacgcgggccaaaacgccgaccggggtgattgcggctctagcctcgcccgcaacggacgcgctgggccgcgccggttttgatggtgacctcgacacccatttctgggagcgattcggttctgcaatgctgctgtcgatcgtcagcgacgcttcttcgatcgggcgtcaacaactgcaagacggctcaatccaggtcaacaacacaacgggcgccaccaacaccgccgccgccatcgccgttgagcagtccatcaacatcccgccgacgctgaacaaaaaccagggcgaattggtcaatatctttgtcgcgcgcgacgtggatttctcctcggtctatcaattgcggcggatcgagagccgtacgcagattttggaccgcaccgtccccggggtcatcgtggccccggctgtggtgacaaaatgagcgaggtcacatcgatcgaacgcgatggcggtcggctcgtgctggcgcgctacctggagccgctggccccatatttggcggacaaaaccctgaccgaaatcgtcgtcaaccgtcctggcgagattttcgtggaaggacccggcggctggagccggcacgaagcggcatcactcacccatgcttaccttctgcatctcgcaaccgctgccgccggccacacccgtcaggacatcggaccggaacatccggtggtctcgaccagcttgatcggcgaggagcgctgccagatcgtggtgccgccggctgtcccggccggcatggtcagtctgacgatccgcaagccgtcggtgctgacaatgacactggacgccttcgagcgggcaaaactgttcgatgaggtccgcgtcgccaatgacgaactcaccgccgacgaacatcggcttctggccctgaaagaagccggtgcctggcgcgagtttctacagcttgccgtctcaactcgccgcaacatcatcatttccggggcgactggttcgggaaagaccacgctgtcgaaggcgttgatcgcggcgatcccggcgcacgagcgactcatcaccattgaggataccgccgagcttgtcatcccgcatcaaaactgtgtacggctgctctacgccaaggacgggcagggtcttgccaagatcggaccgcgcgaactgctcggatcctgcctgcggatgcggcccgaccgcatcctgctgcaggagctgcgcgacggcacggccttcttctatctgcggaatgtgaactccggtcatccaggatcgatcaccacggttcatgccgacagcgcccggctcgccttcgaacaactcactctattggtgaaggaaagtgcggaggggcgcgatctgcatcgcgacgatatccgttcgctgctgctgcttctggtcgacgtcgtggtccagatgcaaaagcgcgaaggccgctaccgcatcacggaaatctattatgaccccgttcgcaaacgcgaccacgcccactaggttcgcgctcggtactgcgcttgcgctcggtgccagtgcgctctttctgctggtcgcctccaacgttctgctgctcgggttgcggctgcatgacggcggattccactggttggagatcgccacgggctggccgcgttacggcgccgacccgcgattcgaccgctggctgacgttggcaacgctcgccggcgtcgttgtggtgttcggaatgctcggcgctatcctccgtcaacgtccgctccctcttcatggcagcgcgcgctttgcctcagagcgggagatcaaggccgcgggcttgcgttccgctgaaggcatcctgctcggacgcaaggacggtgcgctgctgtgtttcggaggctccgaacacgtcctggtttacgcaccgacccgcgctggcaagggggtcggctatgtcattcccaatttgctgaactggccagattccgtcgttgttctcgacgtcaagaaggagaattgggatcgctccgctggatttcgggcggcccatggtcaggaggtccatctgttcgatccgcttgaggagaacggtcgcaccgcgcgctacaatccgctaagctatgtgcgcagcgatccagcggatctctatgacgatctgcagcgcatcgctgtgatgttgtttccagcggagagccgcggcgatccgttctggttcgaggccgctcgctcggccttcgtcgcgatcggcggctatgtcgcggaaacgcctggcttacccttgacgatcggcgagatcctgcaccagctgtccgcgtccagcgacctcaagtcccattttgagaaactcatcaccgctcgcaagtcgggcccgtcaccactgtcgcgacattgtatcacggcgctgaacgatttcctcgcggcctccgaaaacaccatgaactcggtgcgcaagaccgtcacagcgcgccttggtctctggctcaacccccggatcgatgccgcaacttcgaccaacgatttcgatttgcggcagctgcggcaacggccgatgtcgatctatctcggcgtaacgcctgacaatctcgaccgtatggcgccgcttctgaacctgttttttcagcaagtggtcgatctcaatacccgcgaactgccggaacagaatccgaaactcaatcgcaaggttctgctgctgctcgacgaatttccggcgctgggcaatgtcaatgtgctggcgaaatcggtggcgttcatcgccggatacggcatccgcctcctcaccgtggtccagagtccgtcgcagctgcgcgccatctatgggatcgacgccgcccgcaacttcatgaccaatcacgccgtcgaggttgtgttcgcgccaaaggaacaggacgttgcaaatgaactttcggagcggatcggttacgacaccgtgaaagcgcgcagccgcagcggaccgaaagggcttgcgatgcgctcaaccagcgagacggtctccgagcatcgtcgcgccctcatgctgccgcaggaactgaagcttctcccgaaatccaaggccttcattcttggcactggcgttccgcccatcattgccgacaagatcgtatattacgaagacaaggcgttcctcacacgtctgctaccggcacctgtcccggagctgcccaggagccgttcgaatgcactgcttgacgccgagatcaaggagctccgctccgaagtcgccgagctccgcgcggtatttcggtctcgcccaatgaccgacgaggaagtggcggacccctccacaattcccgcaaatgccagtttcgatttcggcgatgtggatgtggatcttgaagggctgtccgaggacgacatgaaagcctggaccttgaattacatcgacgctcaggccctcccactggcgcgacggccaagccggaagcagaatggacggcaacatgaacggcacgcttgacggcggcgaggactttagcctcaaacggcaggatcgcgccggtcgcgatcccaatgcagacaaatcaggcgagggtcgggcgacgacgtcggacaaatcaccctccgcgatggtcggtggcgatgcgctgcccgatcgtatccggcgcaaatattatgtggtgaccaatgagcccggaaaagatcggccagccggcgaggcgcggctttatgccgacgagcgcggcgagtatctcgctttcaaggtcaccgacgaccgcctggtcacgcgtctggcggcggccgaagtgatccgcgacatggtcagcgtggcgcaacatcggcaatgggattctctccaggtccgcggctccgtggaattccggcgcgaggcctggcttgaagccggcgcgcgcggactagaggttcagggttatcagccaactgagcttgaccgacagacccttgctgatcggcgagaagtctgggaccgggcccattcgggcaccccggaagtcgaggctcgttgggcttccgataaaggagagcgcgcggataagtttgactacgacaagggcatatccggacgcctgatcgaggtcggtcaggcaccttaccgcaatcgtaccgatgccgaagcgaccacttatgttgctctcgagctcgacaatggccgccagcatcaagtgtggggcgtgggtcttgaaaaggcgacggccgacagcaacgcgaagcccggtgatcgcgttcacgtgcgccgggacggtgtcgagcgcgtcacaaaagagatcagggtgatcgacgccaccagtgggcatgcacatatcgaacagcgtcagatgccgcgcaatcgttggcaggtgactgctgagaaatttcgcgcggcagatcggcagacagccgcccgtgaacccgatctggtgacggcgcagtcgcaaatggttatcatcgagaaagccttggagcgcgcgtttcccaaggatttacgcgcgcgtcacagcatcatggaagcggcgagggaacggatcgcacaccatcttgggcaaggacactcattcggccgagcaaccgtcatggaaccagctcaggaccgtcatcgatcggaaggcgataaaggtgatgctctgcaagcccggaacggcgagcgcgtgagaattcagcaacgagaacgctgatcgcgccgacttctccgtactaattgtttcaggtcttactcactgcgtgaaatcccaggttcaaatcctgtccccgctcgcgacactcccgcagcgaaagctgcgggagtgtcgcgtttccgagtctttccaatgacttgcgcttcgatccagccaaggatcgtgcccaattcgccgtgtaaggtggcgtcgatttcgccgcggttcgggccagggcgcagcgtaattttctcaaccagcccccggattgcttccgctgcctcaccacgatcctcggggttgttgagcgcctccgccagtcgctcgaccttcatccgatagacacacgacacgttcggatggatgtccggaatatctgccggcacctgcgctagagtttccttcagcacgtcctcgcgggcctccaattcgcgcatgcgatcggtcatgccgcgcgtgtggccgcctccttcaatcacactcagcatttgcttcaaggtgcgctggatcttcgccaactccgagcggtgaccctcgccactagcgcggcgttcgcggttaagcccgttcgtctcctccgcgtaagcgcgtattgcctcagctgccatctgcggcgccatcatccggtcctggagccggcgagcacgcgctgctcaaggtcagcctgtgcgatcgtgcggctgttcgtgcaggagccgttggtaacacgggccgcacaggcatagcggtcctggccgcgcagcgagtaggggccgccgcaaacgccgcaatagatcaacccggaaaacagcgacttcggtcggtgcaagccgttcagccggttcgactgtgcctcacgcaccgtctcgacgacattgacatatttgtcggcgatctcgctctgacgcgctttcaccgcctgccagagtttgtcgtcgataatcctgagttccagaacctcggtgacgatccactccgattttgatgatgccggtgccgcgctttacgtgtccgcggatcatgtattcaaccatgtgaacttatgtggccggccggcgccgatgtcggccacgccgatcagccgcacaggttcgccgccaatcaggttctgcgatggacccggccgacgcgctgctctatcaggcacagcaggacagcttggcgacatccttagtgaaggtctgcgcggcaagcttcaatccctcgactgtcgtgagataggggaagatcgtctcggcgagttgctcgaccgtcaggccgcatttgatcgcgagcaccgcggtctgaatgctatctgctccctcgggcgcaaggatgtgcgcaccaagaagccgtccgctacttgcctcggcgaccagtttgatcaggccgcgggtgtcgcgcgcggccagcgcgcggggaacatacttcagatcgagagtagaggtctttacctttaagcctcgagcgccggcttcggcttccgtcaagccaacgctggcaacttgcggatcggtgaacaccactgccggcatggcggtcgcatcgtagggtttcctgttgccgttgagtgcgttctccgccgcgatcctggcgccgtaagccgccatgtagacaaattgatcgcgcccggtgacgtcgccggcggcatagacgccaagctttgaggtgcgcatgcggtcatcgacgttgataccgccgttcgaaagaagttcgacaccgctttccgcaagcccgaggtcgtcggtgttgggccggcgtccggtcgtgatgaggacacgctcggccgtgatcgtctcggcgcggccatgggctgaaaccaaaagcgcgatgcccatcggcgcttgttggatctcccggtatgagagcccctcgcgaacggcgatgccttcctcggtgaaatatttggtcagtgcggtgctgatttccggctccgcatccggcaacaaacggcggcgtaccgcgatcgtcaccttgacgccggcgcgggcgaacatctggccgagctcgcagccgatgtaaccgccgccgatcaccagcagggacttcggcagtttctcgagttctagggccgtcgtgctcgtcagatacggcacattttcgatccccgggatcgatggcatcgccgcagcggcgccggtcgcgatgatgaccttgcctaccttgatcggctcaccgttcaccatcacgccgtcgtttgtcaaccgggcccggccttcccgataagcgaccgtgttgtagctcggcagcagatcgaaatacttcgcctgccgcaacgacgacaccaattcatccttctgccgcacgaccgcggcccagtccgcgattccgccatccgtccggatgccggcaaagcgcgatgcggtttccgcgtgatgaactgcctcgactgcacggatcatggttttcgacgggacgcagcctacattgacgcaggtgcccccgatcatcccgtgcccgacgagcgcaacattggcgccaagctccgctgcggcaattgcggccgagaagccggccgagccagcgccgatgacggcaagatcatatccgccattcgctttcggcgcgtcggaagcgcaacagtcaccaacggtcatcgtgaaactcctgatactgaattagatcggagaaagccgcgttcgccgacggacggcgctccaccttatttggaatcgtttggctcgccagccgagcgcccgctgtcggaagcgtcctttactttttggcgagccaaacgggcttttcagttcttgacgtgtgcggggtagccggcgttcgtggccgctgcgatcagcgtaggaacatcggcggtcgcatcgtcgaaggtgacggtcgcgacggcgctcgcgttcgcgttggcttccttgacctggaccgctgtgacgccctttacccgcgacagcgtcttcttgacgatcggcgcgcagagttcgcaggtgccgttatcgacattgaggacaacagtcttttcagcggcctgagcgacgagcggcgatagcgccatggcgagggcagcggcggcgatcctgatacgaatcatgatctctctccttttggattctggattgggcaacagactaaagaaataacggtgcgatttttggaaagccgagtgccacgatcaccagaacggtggcgacccaaaggccgatcttggccgtacgtccggaacgcggcttggcgcagtaggaatcttcggcacagtccaccttgggcttgcgatagacgaggtagaacccgtaaccgaggaaggcgaaggtaaccacggcgaaaatcggctgatagggttcaagcgcggtcaggttgctgatccaggctccgctgattccgagcgtgaaaagagcaaatggtaccacgcagcacgatgccgcgcccagcgccgccaaaattccgccaacagaggccagccgggccgtccgggtcgacgaatccccccgatcggcctcacgcgaggagggcgttgcgccagtgaagttttgttgcactattttgtccatgtgctgcgccctccgtgacgccttgtagtgttatggggcctgtagcaagtacaggttcaagcggaactttcggaaccgccaacacggttttgtgaggcggcgcctcaaggaaattgcgcttgaaccctactcgacggactactacggcatattcattggcctacagcatcctctgcgtcttcatcaatgccagttcagcggcgtgtcaggcgctcaagtcgacatcggggtaccgcaccgggtttctttgccgagcaaagatctgcgcttccggaagcgttacatgtgcttcctgccgggcttgcgaccaggccgtgaatgtccgttcgtccttgaacaggttgacgtggtcgcagaacgcgcttcggagattgacgcagcaagcgtcgctatccggcgcgacgatcgacatcacgcagccggatggcggcgtcgagcgcaactggccgggtgccagctcgacggtaagttgggtcccggatccggggcagtgcgtgaccaaggtcgccggcttgccgagaatttccggaagaaaaagcgcgtcaaaagcgcaccaggtatagagcccggcgtcttccgtgtggaagcgatggtgcgtcggaacgaggctcaggcctccaaatgcaatgacctgtccatgttcatcgaatccaaagtttgtcggcgggaattcgagcagaagctggtcgatgcgttccgttggaaggtcgcacccgatgccgagttgctcgcgcgtcaccggcacgccgcaaccaagcaatctgaagagctcgacactcagtctctgcagttccggagtattctctgtcagaacgcgccgcctcaagtaaacgtcgaacgcttggcggccggcgttcggatccaaagcgcgcgatgcgggcttcgtgttattgggggctccctgcgaagcgctcttcatcacgtgatttacttcctatgtttcgtcagtgccgtagatggttttcggcaagctcggaagagcgtagtggctgtaggtaatacaggctcaagggcgaatttcgtggcgatggcacttttccgcgaaacgctcgccgcagcgagcgatgccgcaaaggaccctccggtccgacttcgcgcgcagcccggggtgggttgtccttgccaatggcgggtgtcggcgctatctgacctgtagtcattacaggttcgaggcggatactatgtggagcaagacgacaaaccgggacgaattcctgactcgcggtgcactggctgcccagaccggctgcaacatcgaaacgatccggtactacgagcagatcggcatcctaccggcgccgcctcgcagtcaaggcgggcatcgcctctacgggcaagctctcgtcagacgcttgcatttcgtcctccgaagccgcgatctgggtttcactctcgaagaaatccgggaattgctcagaatggtggatggcgacaattacacgtgcaggcagattgaagcgttggcactcgagcacgtgcaggcgatccgccgaaagatggcggatctcaagaaactcaaagtcgtgctcgagacgatggcttctcagtgcgggggcgggaaaatacccaagtgtcccatcatcgacgcgttgttcgatgcgcgcgcgccgatacgttgggcaaggtagttcgggcacttcggcgcgcgtctcttcagcgttttgaaggcgatctattcccggcaggcagacgcgcgtgacgttccggagatggctcctgcgatcgtgaacgcaagcctcttgaacgtgtaggtactacagggtgcactttgtttctgaacggccacaggagtggaccggcccggagaggcgtggcaccatgaacgaacgcaccataggtgcaattgcccgcatgctcgcggtgctgtgctgcggcgggcctgttctcgtcagcgccgctgggcgcggccgggaccgcggggctcctgtcgtggcttttcaagtccctctatttcgcaatcccgggcagtattcatcgctctcgggctagtcggcgtcttgttgatgaccatgcggttgtgcgagtagatcgtgatgaccatcacgatactcatcacgacgacattcaccacgacactcgccacggtgatcgccatgacgaccgccacgattagagccggttctggtcggaactgggttgaagagtaattttgagagccggaagggaacttcggatttcaccttccggctctgagggtgcaggagaaaccagcaaggcgcgggggctatcgccgaaagttggtgacggtgggaatcggaaaggcggcatatcgtgggggtgcttgacgcctccacttctccaccgaaggagcgatatgccgtgccacaggataacgttatcaagctgattcagccaggattcttcgacgatcaactcaccggaatcttacgcaacggagcccgtgcgctgcttgccaaggcggtcgaggccgaggtcgcggacttcctcgacaagcatgcagatttgaagaccggggacggccagcagcgggtggtccgccacggtcatctgccggagcgcgaagtgatgaccggtatcggtccggtcgccgtccgccagccgcgtgtgcgtgaccgcgaagccgccgccgccgatccagggcgcatccggttctcgccgtcgatcctgccgccctacatgcgccggtcgaagtcgatcgagacgctgctgccgatcctttatctgaagggtatagcgttggcggcactgctcggcaatgatgctgccgggttgtcggcatcggccatcggccgcctgaaggacggctggttcgacgaacaagccgcttggcagaagcgcgatctgtcggcgaagcgctacgtttacatctgggcggatggcatccatctcgaagcacgcctggaggacgaaaagcagtgcatcctcgtgctgatcggcgcgacgccggaaggccgcaaggaactggtcggcttcaccgatggcgcccgcgagagcgcgcacgactggcgcgatctgctgctcgatctgaagcggcgcgggctcgacgtgcccccgcggctcgtcatcgccgatggcgccctcgggttctggaaggctgccggtgaggtctggccgaaaacgcgcgagcagcgcggctgggtgcacaagaccgcgaacgtgctcgccaagttgccgaagagccagcagccgaaagccaaacgcgcgttgcaggaggtctggatggccgaaaccaaggccgccgccgaactggcgttcgaggcattcatcgagagctacgcgttgaaatacgacaaggcggccgactgcctgagcaaggatcgagatacgctactggcattctacgacttcccggccgagcattggaaacacttacggaccaccaaccccattgaaagcaccttcgccaccgtgcgccaccgcatgatccgatcgaagggctgtctatccaacaggaccgcgctcacgatggtcttcaaactgatcgagggcgcccaaaaaagctggcgccgtctcgacggtcataaccagttgccaaaactcgttctcggtgtgacattcaacaacgggatcgaggtcatcgcaaagccgattgatcgtcagcccgcaaccgccgccgcctgaccggccccggccgtcaccaagatttggcgatagctccaaggcgcgagtagtttaggggctaaaattacagcagcgatcagttcgtcttctcgtcataaattccgatgcgtcagcggttttatataataagggcgcgccatttggcgcgcccgatggaattccgagagcaagtgaatcacattttcatcttggaatggtccatgcccttcatgcccttcattttcttcgcgtcgcttttggccttcttttgcttaatctggacaacttcggctccggcgtttgtcatgccaggttgacttccgaccggaagggcaacagccgcagcggcagaactgacgaaggcgaacgctataacgagcaacaccctgttcatattcatctccgagttaatgatgatcacgtgaaccaatgcgagacgtgtgagggagttccctccatgcgaagcgaaccgcctgagggaacttatttcggagtggcggctttcctctctacgattacaaagaggggaggatcctatgtctcgttttccgctcataggcgctgcggcgctgttaactattgcggtatgcgctcccgcctcggctcttcctttggcgaagatgaccaccgctgcgctgcccgaaccgctcgtggaaaatgttcacctcatttgcgacaggtacgggcggtgctacaattcccgacggtatgttcagcggcgctactacgtgcagcccggctattctagttatgcctacggtccgggatacggttatggctacggtcccggcatcagcttcggtttcggcggcggtttcggccatcatcaccatcactggtgagcggggtcttatgtccggcgacggtgcacactttcgtggctgcgcgcagcagcgccgtcaccgtgcctgatcggcctgacgataatggcaccgatcctggacgatagccccacgaaggggctattcgcgcagcgagttatgaatggctgttgctgcggcagcagcgtgtcccattgcgacgctgatttggtcgacacccttcgcgacgtctcccgcaacgaaaaagttcgcgaccgtgcttcgctggtgctcgtcggcaaccacgcagtgattatcgagagccgctcccagtgcgcccgctagagatgatcgcggggcacagcctaaagccgagtagagggtatcgaacgcaagcgtaccgtgacggttcatggtgagcccaacgatcttgccctcatcgatttcgacttgcgtgaccgcctcttcgacggccttgatgccggcggcatgcattttttgccgctgcgcgctatcgagccttagcggctcgcccagcgagaacagcgtgatgtcggccgtgtaggtcctcaggaaaagcgcttcaccgagaccggtttcgccatggccgatgaccgcaattttgtggtcgatcacttcgtatccgtcacaaattccgcagtggcggatgaggcctttctgaaccgcatcgaagaggttaggaagcgccggctccttgtcgatcacgcctgtggcgagcaggacggtttgtgcactgacttgtgtgccttcgagtgttgcttcaaacgttccgtccggcaagtgctcaagttcggatacggtgcctgaaacgatacgcgctccatatttcacggcttgcgagcgcatacggcccaccagttcgctgccggttactccttccggaaagccggcatgattatgtgatttcggaatccaaagggcccggctggcaccggcgtccgcgacgacgaaattgcgccgaaaacggcccagatatattgcagcggtaaggccggcagggccaccgccgattaccaggcagtcgagtttggttgtcatcgtcgaaccttttctactgcatcaatgtcgaaagacccgtcacgggtgttcctctgccccgacgcgccctggattgcgaaattggcacagccgtctgggccaggtccgagatatttcgcttcgtacggaccggccccgacaatgaggtcggaaaggagaatgcagcgtcatcgcgctccccgcactgcggggcaattcagcactctttcagctatatccgaaccgctcgcagccgcagcgcgttgccgacaacgctcacggacgagagcgccattgcggcagcggcaatgaccggggagagcagcaatccgaacgtcggatacaggatgcccgccgcgatcggaattcccgccgcgttatagatgaaagcaaagaacaggttctgccggatgttgctcatcgtcgcctgagaaagacgccgggcgcggacgatgccgcctaagtcgcccttcagcagggtgacgccggcgctctccatcgcgacatccgttccggtacccatggcgattcccacgtccgccgccgcgagggcaggggcgtcgttgacgccatcccccgccatcgcgacgacgcggccttcctgctggagcttgctgacgacggcgctcttctgatccggaagcacctccgcctcgacgtctggaatgccgagccgccgcgcgatcgcgcttgccgtcgtacggttatcgccggtcagcatgatgaccttgatgccttcggcggccagcaacttcagtgcatccggcgtcgacgccttgaccgggtcggcgattgccagaatgccggcgagtctgccgtcgaccgcgacgttgatgaccgtcgcgccgtcgcctcgcagcttttccgcctgcgtctccaacagttgcgttttaatgcccgcggatttcagaaaattggagttgccgagcaggaccgacctgccgccgaccttacccgtaactcccttgccggtcggggaatcgaactcctggacatcggcgagagccagattccgttctttcgccgcccggacaatcgcgtcggcgagcggatgttcgctggaccgttcgacgctcgccgcaagcttcagaatttccgcttcgtcgaatccctgcgcagggatgatgtcgaccaccttcggcttgccttcggtcagcgttcccgtcttgtcgacgaccagcgtatcgactttttccatccgttcgagcgcttccgcattcttgatcaggacgccggcctgggctccgcgtccgacgccgaccatgatcgacatcggcgtcgcaagtccgagggcgcaagggcaggcaatgatcaggacgctcacggccgcaaccagtccgaacgcgagccgcggctccgggccgaacagcgcccaggcgccgaaggcgacgagagccgccgcaatcacggccggcacgaaccagccggcgacctggtcggcgagacgctggatgggagcgcgggaacgctgcgcctgcgccaccatctgcacgatctgggaaagaagggtatcacggccgaccttctcggcccgcatcacgaacccgcccgattgattcagggtgccggcgatcaccttggcgccgctctccttggagaccggcatggactcgccggtcaccagcgactcgtcgagggacgagcggccttcgatgatgacgccgtccaccgggaccttttccccgggccggacccgcagcttgtcgccgacgttcaggccgtccatcgggacctctcggtccgccccgttctcgtcgacgaggcgggcggtcttgggcgccagatccagcagggccttgatcgcgccggaggtggcctcgcgggctcgaagctccagcacctggccgagcaggaccagaacggtaatcaccgcagcggcctcgaaatagaccgccaccgcgccgccgtggcttcggaatgcggacgggaagatgcccggcgctacggtggcgacgacgctgtaggcaaaggcgacgcccacgcccatcgcaatcagggtgaacatgttcaggtttcgggtgaccagcgactgccagccgcgcacgaagaacggccatccggcccagagaacgaccggcgtggcgaagacgagttggatccagttcgaggggttttggtcgatccagccgtggctgccgaccagatggccgcccatctcgagtacaatgaccggcagcgccagcgcgagccccacccagaagcgccaggtcatgtcggccagttcggggttgggttggtcgtcgaggctgaccagttcgggctccagcgccatcccgcagatcgggcagcttccgggtctgatctgacggatctgcggatgcatggggcaggtgtagaccgtgccctccgggacgtcggcgtgctgcggcgctgcgttcgccttatcgaggtatcgctccggagcggcggcgaacgtagtttggcagccggccgagcagaaatggtaggtgacgcccctgaagtcgaagcgatgcttgctggttgcgggatcgacggtcatgccgcagaccgggtctacgacgccggctctgcccgcagcgtgatgattatggtcgtgcgcgtctccgcccccgcagcacccgctcttcttgaccggcgtttcaggaccggcggcgaccgcctttgacgagcatccgcatccgcctcgggacatcgccttctgttcgctggccatttcgagctccttgcctacttgcaacccataccgtgtaggggtatataagacccatgcggaaagacatcaaggtatcctgtcagaaacgcctcggccggatcgagggccaggtgcgcggcctctccaaaatggtggacgaggagcgctactgcatcgatatcgtcacgcagatttcggcggtccgtgccgcgctgcgacgggtcgaggaggaagtcctgagggaccacgtctcccactgcgtcgaacacgccatcgcgagcggcgacaaaacagaccagaggaagaagatcgccgaattaatggcggtcatcggccgggctgaccgatgagcgacaccaaaagttccatcttggcggccgcgatcttcgccgctatgctcccgagtgttggtgcgaaaaggcgttgatgtctgcatggtcgtccggttgaccagaacgaagcgaacaagggcagggtggctggtagccctagcctatctgctttgcgtactggcgccgacgatctcctacgcgctgcccggcgtccacgcgcccgcgccgtgcctgacggacgagaaccacgttcccggaatggttcatgtccattccgagccgcaacatttgcacgacgacggccagatccatgatcatgccgctgcgccggcacattccggcggcggtgaccattcgatgtcggtggcatcggattcgaagtcggctcccgaaaaagctccgcataaatccggcggggagtgctgcgggctgatgtgcgtgaccgctcttccggcgaaggtcgtcgacatcgtgacgccttccgctccgacggcgctttgcgaagtcgaaggttacctgaacgtcgccgacaaggctcccccccggcactatcgcccccccatttcctgacctgatcgaagctacgcggtgccgtgcctgtcgagggctcgcgcgcctgtggtccatcgtcagttcaggaaaagataatgtttgcgcagcttggggcgattctcgccgccgtccggtcggtggtgaagaggatattaggcaatagatttcgggcaatcgtggggatgaccgccgcgacgtggtcgctcgggggatgcattccgaccgttccgctcgtcggtgcggatccggccgacccgaacgtgccggtcgccggcgtcagctaccgctccggcatcgcgccctacacaagcatgcggccgaccgcgccatccggctggaaagaacagaaccagcgcgtaactcccacgcccaaatccgagcagtaggaggacgccatgacagaaacacttttcatccgactgcgacgcgcgacgggcgccaccggggccagaacggcgttatcgtcgctgtcagccgcgctgctgctctcgggttgcgcaacgttctctccggacggcggcatgacggcggtggccgacatcgccggcggcaccatcaagaaggacgtgatctcgatccggaccgccgacgatgtcgtggtcgcgaacgatgcggtcaagcggctgctgcgccggaccctgaacgtcgaaaccgcggtccaggtcgcgctcctcagcaaccggggccttcaggcggcctacaacgaactggcgctggcggaagcggacctcgtccaggagagcctgccgcccaatcccacgttctcgatttcgcgaatatcgggcaacggagccgtcgagatcgaacggcaggtcgtcggcgacattctggcgctcgccaccctgccgttccgctcggaaatcgcacgtcaacgtttccggcaggcgcagttgcgggccgccctcgagacgctgcggctcgccgcggaagtcagacggtcctattaccgcgcggtcgccgccaacgaactcatcggacttctcgcggacgccaaatccaccgcggaatccacggcccaactagccctcaaactcggccagaccggatcgctcaacaagctcgaccaggcgcgcgagcaggtgttctatgccgagaccacggccgaactcggatcgatacgccaggaggcggcgagctcgcgggaacgcctcgcgcgtctgatggggctttggggaagcgacctggccttccggattcccggcacgttgccggcgttgccccggcatccctcggcgctcccgttgatcgaggtcgatgcggtcagccaccgcatcgacctgcagatcgcgcggatcgaactcgacgccctcgcgaaatctctcaatctaacggaagcgagccggttcgtgacgctcctcgatgtggcggggatcgaccgcaagacgcgcgatcccgaaagtgcgcccttccgcgaacgcggcttcgacatccagttccagattccgatcttcgacggcggcgaggtgcgggtccggcaggctgccgagacctacaataagtcgttcaaccgcctgaccgaaaaggcgatcaacgtacgttctgaggcaagggacgcctaccgcgtctacaggtcgacctacgaaatcgccggccagtaccagcgtgaagtgctgccgctgcgcaagatcatcaccgaagagatgcagctacgcttctcgagcatgcagatcgacgttttcgcgctgctgaccgaggcgcgccagcgcatcgcatcgctgcgcgccggaatcgaggccaagcgagacttctggttcgcccagtccgaccttcagacggtcgtcaacggcggcggctccggagagtcccagaaccaaccccgtcagaccaccaccgcccaggccggcgggggcggcggccattaaggagacaatcatgctatcgcgtagaggattcatcggaacggccgcgctgataagcgcgagcgcagtgagcggccgggtgcaggcggccaacattccggaagcgccctccatggaaaaggcggtaatgcagccgccgctgcatccgacgtccggtccggactatcggccggtcgtgacgttgaacggatggtcgctgccgtggcggatgaacggggactggaaggaattccatctcgtcgccgaaccggtcgtgcgcgagttcgctgagggcatgaaggcctacttgtggggatacaacgggcaatcgcccggtccgaccatcgaggcggtcgaaggcgacaaggtccggatcttcgtcaccaacaagctgcccgagcataccaccgtgcactggcacggcatgatcgtaccgaacggcatggacggggtgggcggcctcaaccagcctcacatcaaacccggcaagaccttcgtctacgaattccagatcaagacgagcgggacgttcatgtaccacccgcactcggacgagatggtgcagatggcgatgggcatgatgggcatgttcattgtccacccccgggaccagaccttccggccggtcgaccgcgacttcgtcttcatcatgagcacgtatctcatcgatcccggcacctatctgccgaaggtcaacgagatgaccgacttcaacatgtggacttggaacagccgcgtgtttcccggcatcgatccgctgcccgtccgcctcggggacaaggtgcgcgtgcgcatcggaaatctcacgatgaccaaccatccgatccatctccacgggcacagcttcgcggtgacctgcacagacggaggctgggtgccagaaagcgcgcagttgccggagacgacgaccgacgttcccgtcggagcggtccgcgccttcgacgtgctcgctgacaatcccggcgactgggcgttccactgccacaagtcgcaccacaccatgaactcgatggggcacgacatgcgcaacatgatcggtgtgtcgaagaaggatctcgccaaggctgtcggcaagcttgctccggacgcgatggtgatgggttcgacaggaatggccatgggcgagatggagatgccgatgccggacaacacgctcatgatgatgtcgggctccggccagttcggccccatcgaaatgggcggcatgttctccgtcatgaagatccgggaaggaatggcccgcgacgattacaaggacccgggtccctacaaaaatccgcaaggcacggtcgcatacgaagtcgatgcgcccgcctcagcggctccccgccagaacggcggcaaggaggaaggcgggacgacgcaaatgaagggcatgaaaggaatgaaaggcatgaagggcatgtgatccggacgccttttcgaactcaacatcagacaggagaagactaatgaagaccatcaatcaagccgtcgcttcggcaatcgcgggtttactgctggcaggcggtaccgccgtttgggcgggcgagggtccggccggacatagccacagccacgacgagacgttctccgcgggcgagcccggcgatgccaagaagcccgcccggatcgttcaggtgaccatgggcgagatggacgggaagatgatgttcatgcccgcaaaactggagatcaagacgggcgagcaggtcaagttcatgctccgcaacaacggtgaactcgaccatgaattcatcctggcgacgaccgccgaaaatctcaagcatgcggaggccatgaagaagaaccccgacatggagcacgacgacccgaacggcaagcggcttgcccccaagaagaccgacgagatcgtctggaagttcagcaagcccggagagttcgaatattcgtgcctgatcccgggtcatcgcgaagccggcatggtcggtacgatcgtcgtcaagtgatcccgacaaaaccaaggaaaacatcatgaagaacaaacttgcagcagcagttttcgccgtcgttttggcaacaatttcgaccgcggcgttcgcccagaacgccatggtcaacggcgaggtgaagaagatcgacgagaccgccggcaagatcacgttgaagcacggccccatcaagaatctcgatatggacgaagacggcatgaccatggtcttccgggtgcaggacccggggatgctcaagcaggtcaaggtcggcgacaaggtccagttcgaagccgaacgggcgaccgccggcatcacgatcacgaagatgcagaagggcaagtaaccccggaacggccggtgccgccgcgctgcgtgagccggcggcaccgggtcgagaagcggaccttggagggaatggatggaggcatcgttgcgccaggctgacggagttgcgtccgaacgaccgctcgctttcgatcgcaagagcggaaggctgagcggcgccggcgtgatcgaccgcgttgcggtgctggcccttcaggccggatccgtcatcacgcgaccttacggacatcgcggctacaggcacggttgcaaggcggtcgcgactgtcgttgccgatcgcgacatcatcgtccggttgaacgaggatgccgacttcgccatcccgttctgcgacggatactggagcagaatgcttaatccgagatacgattatgaagaggagatcgaagccttcttaaggtgcgcggcagacctcaggtactccttcgtcgactgcggggcgaacttcggttactggtccgtgctggcgtccagccggcctttcggcaggcagcccacgctcgccatcgaagcgtctccggaaaacgcgaaacggcttggcgcgaacgcgctcctgaacggcgaccgtttccgatggctcaacgccgcggtcggtggacaggcggccggttttgtgaggatcacgggcgcaaggcatgaagccttggagaccctcaggctgaccgaaaacgagccggacgccgtaactgtcgtttcgctggacagcctggttgcgggcgggctcgtcgatgcatcgcttccggtggtggtcaagctcgatgtggaaggcgtggaaatcgaagcgctgaccggcgcggaacggctgatgcaccgcgattgcgtggtcatctgtgaggagcacggatccgacacgacgcatggcatcacgcgtcacctcctcgaagagatgtcgctcagagtatttgtgttcgatcccagggcgtgccggttcaaccgtctcgacggaatcaagcggctggattcgatcaagaggcatccgtgggtcggctacaatgtcttcgctacctccagcgcattgtgggaagagcgactgctcgctgcgacgtggaggtaccgatgatcggttcgacccagctcgcatcgccgccgcagcacgacaggcttagcaaatacccaggctgtccggaaagtgcttttccgcccgccgcggcgacatgccgttgcctgaaattgcaggaggtctgccgcgcacgtcggccatgaattcactcttatggaagatgctcagtccggcgaggtcctgtcgacaacgcgtgctcgcgcttgtgcaaacgctcgtcgccaaagccggaaatgtcgtcgccacatccgcggaacaacaatttgtgccggccgtttgcgaatgtgttttcaaacaatggagaatgagatgtcacgaaacatcctgaagatttcggccgcgtctgtcgcggtgctgtttgcgctatcgatgccttcgtacgccgacgacgccggtccggcctacacaaagtccatggaaaaaatgaatgccgacatgaagaagggaatggatcccgaccctacgaaggcgtgggcgaagatgatggtcgctcaccatcagggcgcgatcgagatgtcgcagacggtgctgaaggagactaaagacccgatgatccgcgaaatggccgagaagacggtcaaggatcagaccaaagagcagaccatgctcaaggactggatcggcaagcacggcggctgaacagcctgaacacctgaccgcgaggactccatgatcgcacttccctacgattattttctgatcgcatggttcgtcctcgcggcgggctctacggcctacgtcgcgttcgaccagttcaacggcaatcccgagccgacggtgatgaagtggggtttcatcctggtcaccctctacatgggcccgttcggattgctgctctacgtgctcgcggacaaggagccccgtccaggggagcatgagcacttcacatcgcccctctggaagcagggcgtcgggagcactattcactgcgttgcgggggatgccaccggcatcattctggcggcgaccgtgacggcactgctgggcctcccgatgtggatcgaccttatcgtcgaatacattgccggtttctcgttcggtctgttcattttccagtccctcttcatgaagaagatgatgggcggcacctattgggaaaatgtccgcaagagcttcatgccggaattcatcagcatgaacgcgatgatggcgggaatggcgccgacgatgagcctgctgatgatgggccgcgacatgcgcgccatggatccgctcgaattcgtcttctggggcgtgatgtctctcggtgtcatggtcggattcacgacggcctatccgttcaacgtctggatggtgaagaagaaggtcaagcacggcctgatgaccgaacggccggaggcagccggccaacaacgcgacatgtccggaatgaagtccgagacgggtcaaatgtcggatgagcagatgagccacatggagggacatgggggacaacagaaagcaaaaaagtcgggcgaccgcgaagcgtcccctggcgggggccatcagatgggcggcgacgcgacgactccacagttggcggcgctcgccggcgtgacgtcgttccttctgatctccggaatggtgataccggggttttccgtcaacctcggtctcagcgcccgcgacgtcgacggctccatcatgccgccggggatgatcaacaccttcgatctgcccggcgaggctatgaaggacatggccgccgtgaagccgcgtcaagtcgcttacgtggcggcgcccgacgcgaggggcgacaaggtccttgcgccgcgcatcgagaacggggtcaaggtcttcgacatcaaggccgagatcatccgatggaacatccttccggacgtggcggtcgaggcctacgcgtacaatcgtcaggtcccgggaccgcggctgcaggtgacggagggggatcatgtccgcatcaacttccgtaatgcgcttccagaaagcaccacggttcattggcacggactgatcgtcccgaatgagatggacgggccggccaacgtcacccaagacccggtgccgccgggcggctcctacacctacgaattcgacgtgggccagagcggcacgtacttctaccacagccacgatcatccggaccgccagcaggcgctcgggctctacggggcgctgctgatcgcgccgaaggacccctcggccgaggtgaaggccgacctcgattacgcgatccagctacaggagtggctgaagcgcgaatggctgacctatccggcgatgctgatggaaggggcgcttccgaactacttcacgatcaacggcaaggcatacccctcgaccgacacggtcgccatgaaggtcggacagaccatcaaacttcgcttcatcgggacgaacaacaacttcgtgcatcccatgcatgtgcacggcggaccgttcgaagtcgtagccgtggacggggtgaacctcaaggaaagcgcgcgataccaggcggacacagtcaacgtcggtcccgggcagcgctacgacgtggtctggacggcacgaaagtcgggcaaatggctggtgcactgccacatcccgcatcacacagccaacaacaacgttgagcagcacggcggcggcggcctgatgcttgtcctcaacgtccagtaggccaacggaaaacaaaggagagaatgagatgaagacgagcaaggagatgcaggcgtgcatcgacgaatgcctgcgctgctaccagatgtgtctcgggacggcgatgacccactgcctggagtccggcgggaagcacgtcgaaccgaagcacatcagactgatgatggcgtgtgccgagatatgccgaactgcggcgcacttcatgcttctcaattcgcctcaccatgcgcacgtctgcgaggagtgcgccgagatctgcaccgaatgcgccaaggactgcgagcgcgtcggcgggatggacgactgcgtgacggcatgtacgcgttgtgccgaaagttgccgggcgatggcaggctaatcgatgccgtctttgcagccggtcagaatatcgcggcctgacgaaccgtcgacgacagtggcttcgtcggagccagcatcgtcggacaatatcaagagttcgatgccagcttccaaggccgtttcgccgcgagggcgggatctgcgtctcgacctgtttcgcggtctggcaaactgggcgatatttctcgaccatatccccaacaactcgatcgcttggctgacgacgagaaactacggtttcagcgacgccgccgacatcttcgtcttcatctccgggtacacggcggcgttcgtgtacgctcgaaggatatccgcacaaggaatgctcgccggaacggctctgctgatgcggcgcgtttggcagctatacgtcgcccacgtcctgctgttcgtcttctacgccgcggcgatcggctacgtggcacagcgctacgggcattcgcaccttctcgacgaattcaatgtcgccggcctcatcgagcagccggtcgccacgcttacgcaagggttgatgctgaagttcaagccgctgaacctggatgtccttcctctctacatcgttctgatggccggtttcccgccgctgctgatcgtcatgatgcggtggccgaatgcggcgttggcggcttcgatctcggtctacctgtctgcacgtctattcggttggaatttctcggcatatccttccggcgactggtacttcaatccgttcacctggcagcttctgttcacgctgggtgcgtgggcggccctgggcggtcgcgcgcgtatgcaggtactggcgcggtcccgtgccgtccttgcagcgagcatcgctttcgtcgtctttgccgctgtcgtgacgctcgctgaccgtttcgagacgacagcgtttctgccgaccggcatgctcgaatggttcgtcccgaacgacaagacgaacctcgcgccttaccgggtgctgcacttccttgcggtggccgtcatcgtggttcgtctggttccgtccgattggagcgggctgcgatccgcggcgctgcagccgttgatcgtctgcggccagcggtccctcgaagtgttctgcgtcggtatctttctgtcgttcgtcggccacttcatccttgaaatgtattcggatgggttggccgctcaagtcgcggtcagcgcgggcggcttggcgctcatgacgtgcgtcgctttctaccggaactggtcgcgttcgctggaccggccgccgtcatccgcaaaacgaaccgccgtacttgacgttcgtcggcgagaaccttcaacagaccaaaaggtggatgctaaatgacgagacggttgggtgttgcggtcctcgctgcggtggctctatttggcggaattctattctacgtgggctacggcttctacgatgtcggcgcggacacgccgcattgggaaatcacccgaagggtaatggagaccgttcgcaaccgctccatcgcggtacgcgccggccggatcgagctacccgaccttcaggacgagcaactcgttttgaagggagcgggacagtatgcggcgatgtgcgtgaattgccaccttgcgcccgagcaatcggattcggaaattcggcccggcctctacccgaagccgcccaatctttccgaacagcgtttcgatcccaagaccgttttctgggtcacgaaacatggattgaaaatgagcggcatgccggcgtggggtctcggacatgacgatgcgaccatctggagcatcgtcgcattcgtcaccaagctgcccggcctatctgccgagcactacaaggacatggtcgcgagggcgcctccggacgaagagatggagttccatggacaagggggacggcaagaagccggaaaacaatggcaagaagcccggggccgggatgtcgatgccaaccgagcaaaagggtgaacacaaacactgagccgacagcggcctatcgtcggccgaagacaggtggaggatgtggatggaagacgacaacaggtctgcgccgcgtcacaaagtcctgaaggccgcgacgatttccttcgggggaggggccattagctgtaccgtccggaacctttcggacagtggtgcctcgctcgaggtggcgtcgccgatcggaattccagattccgttgttcttgagctcgaaggcggcggccgccgatgccgggtggtctggcggaaggagaagcggatcggcgtccggtttgtagaccggaaggacaagcccgaagtgtcgtcttagctgtgcggaaagggataagtccggtatattggttgagcttgaacgagagttcgggtaccgggcgcgaggccgaatggcctgccgccgaagttagaacgggtggtttagcgaatggagcaggcttgggtcggagatcttatacggcattggaggaatgacgaggcggggacgtaccggacgtggtttctgtgggacgcgcggataaaaaatttccgatctatcaggcgcggacttcaggaggtgatggccgagatcaaggctgacacgttcggaaacgcctatcgcggctcatcgctcgaaacggtgctggattcgatcgccgagcagcggcaggtcttcaagggcgccgaccatgcattcatgtggaaaccgaagctccgtatcccggacatctacgaaaatcggcctaaccaggtggccttcgggaatttcctcgatacctgtctttgctgcaataccgaggaacacgtgatcgaagcgatccagaagctcgaccgggcgaccatcaaggggctcggtcccgcagccgcaaatctgctgtatttcctgcatccgacgatcgcgccgccgttcaacaccgccatcgtgagaggatacaatgccctgacgggagcggacgtgaaattgggccgttgggagcagtatctcgccatgcgccgaggagtcctggcgctgaactcgcagtatcggaatttgctttccaacgatctcggagccgcggcggcgttcctgttcgaggtcggcaccggacgctatccgcttccggaacgtcaagaagacggctccctcgatcgctggaggtccgatctcgatcaggtccgcgcggaatccgcagcgtcttcgaaagcggtggcagcagcccgtgaggcggaccatacccataccgagatccaagggtggctgcgggacctgggtttagcccttggattccaggtgtggatagcctcgaacgacggagcgcggtcctacaaggacgggcggctggcgaacggctgtctcgaccgcttgcccgcggccttggccgaggccggcgctgcggacgctattcgtctcatccacgtgctctggatcgaacaaggcggcgatgtggctgccgcgttcgaagtcgaacacaccaccagcatctattccggcatcgtccggatgctcgaccttgcgctgggcatcgatggtgccgcagcgcgcaacttcttcctcgtggctccggacgaccgcgagggcgaagttagagcgcagtttgccaggccggcgttctcacgggtcgccgaactcaaccttcgttatctgccatacagcgagttgcgggaccaccgcgacgccattgcccgctttggaaacggcatcaagggaatcctggcgattgctcggctgatcaggccgatcatgtcgaccgcgcaagacgccaccggcaatgtttcaggctgctgactcttgccgaccgcaagctacgacactctgtccttggcaatgccggcgggattcggacgcgcgcgcttcgatccgaccttaagcggccagcccgcggcccgcgacgacgtcactgcacccgactaactcgggcaaaggcgcgaccgatacgcctgtgggcccgccgcgacctcggtgggaggctttccgatgcaggcgagggtgcgcccggcaaatcccggacgctttgcgaaaccgggggctcctggggcccacagccctcgggagggagcaacaggggccgctagagacgcccccgaacaaagactatttcggtttcggcccggttgcgcgttcccgtcggtaatcgtcgatctcgtcgacgagacggcgcgcaagaggatgaagaccgacgccgtgggttggctcgccggcgaacttcgtcagccgcgctgacaacggtccggacacaaccgccctcgcttttgcttcaggaggccatcgcgcttctcaccggagatccagaaacctgatatcgcggacgattcagtcggggacggttcctagcttgttcagatcgtcgacgctctgcgaattcttgaggagcccacctacctgttcgtaggacctggtcacctcgctcaatcggctcatctcctggacgttctggacattggatttctccaaagcgccgaccgacagtttcacggaccccgtcggaatatcgagggcaggagtctggctctgaaataggttagaccccaccgcttgaagagggccgtcgaaccgaacgaggcgaaggctgccgagaatccgttgccgggaactgatggtgccgtcggcggcgatcgtcaatgagcgctcttcgggtgcgatcgtgatcggaccagtccgggaaaggatcggctggccttccatagtgaccaagcgtccggtggcatcggtggtaagcgcgccggcccgcgtgtagcgctctccctgcggcgtctggacggcaaaatagccgtctccgacgatggctacgtcgagaggatttccggtgagttgaatggcgcccccggagacgtccggatactggaatccggcattcaccaacgagaccgggcgctccctttttccgtcggcttcgccctccttcgccggcgagagatattcctgaaaggaaagctggcgcgcacgaaagccggtcgtgtcagcgttggcgacgttgttggcaacgttgtcgagcctgcgttccagcgcgatcagtctcgacagatgaataatcgtggtctcgcccatgcgatcgccgaatcagccggttcagttggaccgagtgtagcagatttccgaatcccagcgcctctggagtgttcggacactacggggcttgcgccgcgcgcgaggagcaaacgcaaccagatgacgagggcagcgaaagaatgctttgcggcttacatcgttcgaagacgcagcttgccgagccaccaggaaaacgaatgctcatagaccggctcggatggccacgcgcaaaagagtcaattggtgggcatgctgatttgcgcgaccatccgcaaaaattggttatgcgaagtctcagccatgaagggcaacgcgatcagaaaagtaacgaatgtcgcaaggatcttgggggtttgaatgagcgtctgctcttggatttgcgtaagggcctggaacagcgagacggcgacgccaacgacggtaccgacgatcaacaagggtgccgaaatcacgacaaccgtgatgatggcatcgtgcgcagcgctcatcacttcgagaccgttcatgaagaatctccctgctgcaatatggtcttttgcatctgcgatggttaacaactggttaatggccatcctttgcagagggtcaccgccagcctcaaataaagcaagctgctcgcggcatgaggccgatggccggcagattgtttccgagggcgaaagggacgctgatcacgcggatttgggcccgcggtcgcgaagacctagatatgatccttgctgaacgtcaggggatgtccagaagatgtacaaattaagcacagtgactcggcgaagtgcgctcgcgatcttcgcagcgggattggttgcgcgggggtatcccgcctcggcgcagacgccagccatcctcgttcacaaggatccgaattgcggatgctgcacgggttgggtgcaacacctcaaggacgctggattcaccgtcactgtccaggagacggcgcagcttccggcagtccggaagcgcctcggcgtgccgggcgaccttgcagcgtgccacactgcggaaatcggggggtacgtcatcgaaggccatgtacccgctttcgccttgcgacaattgttggagaaacggccaaccgccatcggacttgcggttccaggcatgccggcgggatcgccgggaatggagggcggccccccccccggaagtacgacgtggtccttttcggggccaccggccggcggtcattcatgcagtttatcggctccgaaatcgcgagttgaagcgcttcttggttaaccgataactctcatttggcctggaaacgcctctggcgaagatgtgaagggatagtccttcccaagttccctatcccgtgggatggtaggcaatgaatcttcgccgactcatcggtcgtatgcttgcgatcttcgtgatcgtagggctcgtctttgcgccgctggtcacgccggcggcggcaaagcgtctggctgccgctgagatgaccgatatggccgcgatgtcggacgctatgccttgctgtccggacggccaaaaaagcaataactgccgggattgtccgcttgtcgcgatgtgcatgctgaccatcgcgcaggccgaaccatccccaacggacggtgtccaagtttcctttcaaaccagccgactgcttttccctctcgacgacttgattgcggacggcctcatcggttcccctccggatcatccccctcgaatcgcgatctgatcggcgtctccacgccgtctgctgctgcgcggtctcagggccgcgcagttaacgcacgccgccgttcgcggcgcatcgggtcatcgaggatttgtaaaatgaagaagtatgccttcgcgcccgccctccgggcggcgttgatcgccgcttccttggcaggttcggccacgctcgcgcgcgccgacatcaaggactacgaattccaactggtcgacaagacagtcaagaagggggacgcaaccatctcggtccgcctgatccacaagcccgacggcaagccggttcccgatgcggtgatcttcgcaaagagattggacatggctccggacggcatggacacgatgaaaacgtcgatcgaggcgatgccgagcacggagccgggcgtctataagttcaaggccgccataactatggaaggtggctggcaattgtccctcggcgccaaggttcaaggcgaaaccgggacggttgaaagcaagctcgtcatcaaggccacgccgtgatccgctcagccggaatcactggcttcgccgcaatccgagcaaccgcagcattgctgtggttgtccccggccttggcagccgagcagactttgcccggagctaccgcggaaagcgtcgtggcggttgccaaacgcctcaacccgacggtggcggcggccgcgctcgagttcgatgcagcggttcacaagatcgggacggcgggcgtattggctgacccgaccctcattctcgaggcttgggacgtcaaccggcagggcgtgggacagcgccgcataggcatcgaccaggagctcaagctttggggcaaatacggcctcgagcgcaacgtcgccacggccgacgccgatgccgcaaaattccaaggccgtgccaccgtgaccgaactcatcgcgcaggtcattacagcacatggcgaatacaatgcggcgtatgaagccgttggggtcgccaccgaaatcaagcggcggtacgacgagacgctcggattgttgcgttcgcgatacggcacgacatcggtcgaccggcaggacgtcatcaaggccgagatcgaagcggctaccgccgacggcgacgtcgtccgccgacaaggcgaacagaaggcagcggcggccaggctgaatgccctgatcggccgtccgtccctggcgcccttggctccgccgaccggctttcgagcaatcaaggcaatcagcctcgcgcaggttcaggcactcgcgcgctctgctaacccgatgctggcgctggccggagcccagagcaattccgcggcccagaccaaatcccttaccgacctcaactactatcccgacgtcacgctcggcgcgaaatacgtgcagcggcccgggaccgaggataccggcgagttcatgctcggcgtcaagctgccgctgcactatgaagtcaaggacgccgaacagcgggcggcgggcgcgcgtctcggcgccgcgcaagcccgcagcgaggcgctgcggctgcgggtcgacggacagatcgccgacgcatggttcagcgtcgatgcgctacggaaggtcgtgcagatctacgcgtcgcgccaattgccgcctgcacgatcatccctcgacaatgcgcggaacggtttccaggccggcacgtccgatctttcctcggtcttcgaggcggagcgcaggcttcgcgctgtccagctcgacctgctgaagctcaaggtagaacttcaaacgaaatacgccgaaatggaacgtctggccggaggttcgctatgagacggccagtaggtgctttgttagcctttacggcgatcctggccgccggagtggtcggattggccgtcggacgttcgagcgctccgcttccaggatggctgtccgccgtacttcccgcagcggcaaagccaagttccgctcaaccggctgcgacaggaccgatcgtctactaccgtgatccggacggcgcgcccgattattccatgacgccgaagaagacgccgtcgggcaaggaatattcggcggtccgcgccagcgaagatgtgagcttcgaggagcacgctccggaagccatgactgcgaagggcggcgaacgcgggcggatcaaattctatcgtaaccctatgggccttccggacacgtcgccgacgccgaaaaaggattcgatggggatggattatctccccgtatatgagggcgaacaagacgacgactcatcggtcaaagtgagcgcgggcaagctgcagaaggcaggtgtccagaccgaggtcgcggagcgccgctccttgaatacgatggtccgcgcaccggctacggtacagcaggacgagcggcgcgtgtccgtcgtctcgctccggttcgagggcttcatcgacaccgtcgacaacgtcacgaccggcacgcacgtccgcaagggccagccgttgatgcgcatctacggcccgaacctgtcgagcgccgccgccgaatatctctcggcccttaacgcccgtccggaagccggcatcagcgggcaggccctgaaaggggcgcgccgccgcctcgaaaacctcggtgcgcccgatgggtttattgccgacatcgagcggacgcgcgaggtcccggtctacctgaactggcctgcgccgcaggacggtgaggtcgtggagcggacggccgttaacgggatgcgtgcagcgcccggagacgtgcttttcaggatcgtcgaccatgatgtcgtctgggtgatggtcgacgtcgccgaacgcgatcttgcgctcatcgaactcggacaaaccgccaccgtgcgtttgcgcgcctatccgaaccgaccgttcacgggaaaagtcactgtgatctatccgcacctgaaaccggaaacgcggaccgcgcggatcaggatcgaattacccaacccggacgacgtgctgcggccggacatgtatgccgacgtcgaaattgccacggggacggaaactccagtcgtaaccgtatccagcagcgcggtgatcgacagcggcgagcggcagcttgtgctgctcgacaagggcgagggccgtttcgaaccgcgggcggtgaagatcgggcgccgcggcggcggcctcgtcgaggtcaaggaagggctcgccgaaaacgacaaggtcgtctcttccgcgaacttcctgatcgatgccgaaagcaatctcaaggcggcgctcaagggcctcgacaccggagagaaaccacaatgatcgcgcggctcatcgattggtcggcccggaacctgatgctcgttttcatcggcgctatcttcgctattgcggccggggtctatgccctgcagcactcggcgctcgacgcgattccagatctctccgacacccaggtcatcgtttacaccgaatacaaaggtcaggcaccacaggtcatcgaagaccaggtcacctatcccttgacgacggccatgctcaccgtaccgaaatcgaaagtggtgcgggggttttcattcttcggcgtctcgttcgtctacatcattttcgaagacggcactgacatctactgggcgcgttcgcgtgtgctggaatacctcaacgccgcggcgcgcaaattgcccgccggcgtgacgccgacgttggggcccgatgcgacgggcgtcggctgggtctatcagtacgcgctgcagtccaaggacaaatcgctggccgatctgcggtcgatccaggactggaccatccgatacggaatttccaaagcggaaggcgtggccgaggtcgcaagcgtcggcggcttcgtcaggcaatacaacatcatcgtcgatccgaaccggttgagatcgctcgacataccgcttgcgaaggtgcgcgatgcggtccgcggcagcaacatggacgtgggcgggcgcaccgtcgagctttccgagttcgaattcgtcgtgcggggcagggggtatgtcaagagcctctccgacctatcgaacatcgtgctgaagctcgacaagggcacgccggtcctgctgaaggacgtcgcacgggtcgaactcggcccggacgaacgccgcggcataaccgagctcaacggggagggcgaggtcgccagcggaatcgcactgcaacgcttcggacagaatgcgctcgacgtcatcgacaatgtgaaggcgcgcctgggggagatggcttcggcgcttccgaagggtgtcgagatcataccggtctacgaccgttcgaacctgatccacgacgcgatcgaaacgctgaagcggacgcttaccgaggaaagcatcgtcgtcgcgctcgtctgcatcgtcttcctgctgcacgtgcgcagcgcgctcgtcgccatcgtgatgctcccgatcggcatcctgatggctttcgccgcgatgaaggtgctcggcatcggatcgaacatcatgagcctcggcggcatcgccatcgccatcggtgccatgatcgacggcgccatcgtgatgatcgagaatgcccacaagcatctcgaacgggcgccaccggacaagccgcgcctagaggtcctcatcgaggctgcaagcgaggtcggcccggcgctgttcttcagcctgctgatcatcacggtatcctttctgccgatcttcaccatggaatcgcaggagggccggctgttcagcccgctggcgttcaccaagaccttctcgatggcggcggcggcgatcctgtcgatcacgctggtgccggcgctcatggttctgttcattcgcggcaagatcattccggagcacaagaatcccatcaaccggttcctgatctggatctatcgcccgatgatccgcggcgtactaagggccaagacgctgaccatctttctggcgcttgtcgccttggcgatcagcctctggccggcccggcaactcggaacggagtttatgccgagcctcaacgagggcacgctgatgtacatgccgacgacgttgccgggcctgtcggtgaccaaggcggcggaaatcctgcagacgcagaacaaggtcatcaagacctttccggaagtcgagtcggtctacgggaaggcgggacgcgccgaaacggcgaccgaccccgcgccgaccgaaatgttcgagacgatcgtcaatctcaaacccaaggcgcaatggcgtgcgggcctgaccgtcgacggcctcatcgccgaactggacaaggctttgcagtttcccggtgtctccaacgcctggaccatgccgatcaaggcccgtaccgacatgctcgcgaccgggatccggacaccggtcggcataaaggtgttgggaaaagacctgacggaaatggaaaagctcgcccgccagatcgaaaccgtcgtgaaagcagttcccggcacgtcgagcgcttacgccgaacgggtcatcggcggctattacctcgatgtcgtccctgaccgggaggcgcttgcgcgctacggtctcatgatcagcgatgtgcaggacacggtctcttcggcactcggcggagagacgatcaccaccaccgtggaaggccgcgagcgttacggcgtcaacctgcgatacccacgcgacctgcgtagcgacccgcaatccatcgcccgggatgttctcgtcgcgatgccgaatggggggactgtcccgctgggcgaggttgcagcgatcaagctcacgcgcgggcctacgtccatccggaccgaaaacggccaactcgcggtctacatcttcgtcgacatccgcgaccgcgatctcggcggctacgttgccgatgccaaggccgccgtggccgccagcgtacaatttccgccgggaaactatgtcgtctggagcggacagttcgaataccttgagcgcgccaccgcgcggctgaagatcgtggtgcctgtcacgctgctgatcatcttcctgctgctctacttgaacttccgccggctgaccgagacgctaatcgtaatgctgtcgctgccgttcgccctcgtcggcggattgtggttgatgtggtggcttggtttcaacatgtccgtcgcggtggccgtaggcttcatcgcgctggccggtgtcgctgccgagaccggcgtcatcatgctgatctatctcgatcatgcgatgaaggagattcacgccgaacggttggcggaaggcaagccgttcacgcggcgggatctgaacgaggccatcatgctgggtgcggtcgagcgcgtgcggcccaagatgatgaccgttgtcgccatcatggcaggccttataccgattttgtggagcaccggtaccggctcggaggtcatgcaacgcatcgccgtgccgatgatcggcggcatgatctcgtccaccattctgacgctcatcgtcatccccgcggtctacgcgctgatcaaggggtttgggttgccgcgcgaaccgggctcagccgtccccgtggaccggaatagccaagaacggaagacggcaagtgatttcgaccgctcgcaagcagcagagtgacgaagcgccgtccctcctcggcgccaggatgatgtgagggaccagtgggacttcaaaaagtggcggaagaagttgggcatcaaccagatcgtggcgggagaactgctcggcatgagtcgcggcgcagttcaatactgggaaagtgacctcaggccggtgccacgcgccgtcgagcttgcctgccaggaattgttgcggcgctggaagcagcggcctgaggtcgattcccgcccatccggcgatctggtcctgcgatgcgagccgcatccgaacaacgagagcgccttgggccgcgtcgttcggctgagcgaaaccctgaaccttttcatgccgctcatcgtggatgacgatggaaccgcggtctgggccggccccgaattgctgcacgaatgcgaggagcggaaaagacgcgatcggcaagcaaagcgcattgaggcctagccgaagcgcagcagacctttccgactatttttgaggccggtcatcttcggctgtaaccaaatccgccggaccggcgaactaacagagatacgcaagcatgacgacccacgaaatcgaactcaaggcgctaatgcttgccagcctggacggcgacgcggcctcgcaccgcgcgctgctcgagcgattgagcagccgtttgcgggcctactacaagggcaagctcgccaggatgggaaggggtgcggcagaagcggaggatctcgttcaggaggcggtattggcggttcacttcaagcggcacacctatgatcctgccgagcctctgacgccttgggtccatgcgatcgcgcgctacaagttgatcgatttcctgcggcgtacccgcacgtcgcgggccgacgtgcctatcgaggaggccgatgcaatcatggcgcacgacgacaatgtcggcgcggagagtagctacgatgttaggaggctcatggagcgactaccgaaaaacatgcggtgttccatcgaggccgtgaagctggacgggttgagcatcgcgcaggcggcagtacgatgcggcatctccgagccgggggtcaaagtgaacatccaccggggactcaaagcactggctaccctgatcggccgggaaaagcggacatgaagactgacgagcttgtggccctcctgagtaccaatcccgagccggtcgaccgcggtttggtcgttcgcacgcttctggtcgcgcttggggcaggttcaattctggccttgggaatcacgatcttcgggctgggcgtccgtccggacatggtgacgtccggcgccttgggtttcgtcgccacaaaggtctcattcgcggtcgggattttcagcctcgcgcttgtctatctcgcaaagctggcgcgccctggcggggagcgaaaacctcgatcgtatctcgttgcggtgccgtttcttgtcatcgtggcgcttgcagcaatcagcctcgggctggcgccaagctcgcactggaccaagatgatcatcggagacgaatggctcgaatgccttgtttccattccggtcatcgcgatcgttcctttcgccgtcgctatctgggccgttcgacaggcggcgcctacgaaccttgctcgcacgggtgctttcgcgggacttgttgcgggcggcgttagcgcgatggcgtatgcgctgcattgcgcggacgattccctgccttttgtagcggtttggtacggcggcacgattgtgctttgcaccttagcgggcgcagcaatggggccacgactattgcgttggtgagcgtttgccggtcacgtcagcgtgagcttgtaaccggcgaacgaaacggtccgaactcataagtagaagcgcacaagacgcgcttcgaagaactgatggagccggatcatgacgaaaaaacttctcacgatttcactcttgttgccgctaatggcggcgtcggcgtctgcatttgccggatcaacgatcaccgacaaaagctattggccgaatgaggccaggcagagcgcacaagccaggaccggtagctcacaaggcgatccgaattccgcgttcgcttacgaccggataccgtcacgcctgcattccgcgccaaacgtgaacgacggcggatcagcctggcgttaccaaggcggtcccaagtccagatgatgggtgcggcagaaactgatgcgccggtcgcccagaccgacctcgacgaaccgtccaagattttgcgacctctcgcgccttcaacaaaacgaggtgatccatgatgaacggtatttcgcccgcaatgtcttggggcatgggtctggtctgcgtgctggtcatcgtcgttttaatattggcggcagtagcgcttgtgaaatatcttcgttccgaaaaccaggctcggccggaatgaagatttcggggactgggtccgtcggttcaatgtgccggaggtgagcagatatgaccccggtcgcatgccgctggacgttgtccgcggccaaggggcatgggaaattgagcatttaggcctgtgagcccgcggcgacccccgtgagacccttccttcgtgtttggtcccggaagattggttgaatggaatcggtgtagaaagaggcgtctgttacgtcagggagcgccttgcgtcatggaactgaacctgcacgccaacgctacgaccacgcctaaggtccgggcttacattcagcgcagcaaaaagaagatcgcggaactggcgagcgaactcggcgtaagccagaccacaatccggcggtggcgcacccgtactacggtcagcgatcgttcgcatacgccaaaaaagctgacgaccagcctctcgctgatggaggaggcgctcgtctgcgagctgcggacgcggctgcagttgccacttgatgatatcgtcgaggtgatgcggcgctgcgtcaactgtaagctgtcacgtagcgcgatccatcgctgcctgaagcggcacggtctgaaccaaaggccgaagcccgacaagcctgctgttggcatctttgagcaggccactgtcggcttcatccacatttgccggccctcgagcgacgtaaaagctacgccttcgtcgcgatcgatcgggccactcgctacgtctacatggagatccatcaaaaccgggatgccaggacttcggaagaattccttaaacgtttcctcgcccacttcccgcatccggtgcacaccattcttaccgacaatggcgccgagttcacggaccgcttcgccgtcgacaagaagaacaagccgatcgacaagccatctggccagcatccgttcgatcaagtttgtgcaaagcggggcattcaacaccgcctgattagaccctaccgtccgcagaccaatggcctggtcgagcgtttcaatcgacggatcgtcgaagcgatcggccgcgaacccaaacgtggcatcgcccgccggctattccattctcacctcgaccgcgatcaatttcttcatcgcttcgtcatggactacaaccgtacccgcctcaaatgcctcgactatctcgcgccgtgcgaagctctagctaatcttccgggaccaaacaccttcgcagggcaggcgagtgtaggggccctgcacggccgttttgccaaacgggaggccccggggggtgcgcaggcttctctgcggaaagcgtctcggatcctcgggctgcacggccacgatggctgcgctgcagcagcgtgcttcgcggccaggggagtcctcccagcttagataacaagatccgtagcctaggctggtcccggctgcttccttgcataatctaccaactccgcaaacttcgcctcgaacgtagctttgaatgtccctgagacctggccggcctcgagccagacgctgcgaacgagtggctcactgcggcaggggacggcggctttgattggccgggacgtcttgaacttgcacacgatacgccgccccgctgctggtacgatggccattggtcgccaccgccgccgcagttgcgttgccaatttcgcttgttcctgcgtgcgcagatctaattgtgccggtgtcgatgatgcaaatcgggatagtgtggatgcttatgtcgaataggttcgtggcgatgccaatgtgaatgacgctccaacatctcttcggcatgatgtcggtgatgctcgtcgtggacgtggctgtggtcatgctctagaaactcatgctcgtggtcgtgctcatgccgctcggcgagatgcagccaaataccgccgcccattagcaaccctgccagtgccaactgaggggtgagcggctcgcgcagaagcaggatcgccacaaccgctccgatgaagggcgccaacgaaaaataagcgccggtccgggcggtccccagatgccgcagcgccagcacaaataaaatcagactcaccccgacgccgaaaaagcctaccaaggccgcagcaccgatcacggaaagaggcggaagcgctgagccaattgcaagcgccagccccatattcacggttccggccactagtcccttaatgatggtcgtgacgactggatcagcagcagaaagcttgcgcgtaaaattgttgtcgaggccccatgccaaacaggccccggcaatcagtgctccgccggcatcgatcgtgatgctttgtccatcccatgccaggatcaccgcgccggtcaagatcgcaagcgctcccagcaagactttactgtcgacattctctttgaagatcacccacgcgatggccattgtggcaaggccttcgagattgaggagcagggagcccgacgaagcggaggtgcgctgcagacccatcatgagcagcaacggggcgagacatccccctaaaatcacaacagcggccagccagggcagatcaacgcgtcgcagacttgcttcagcgacaggaacgccaaaagcggcccgcccaagatagacgatcgtcaatcccgttcccgcgcctagatacaggagacctgccagcatctgcggcgcaatcgaacccaggagaaccttagccagaggcgccgaggcaccgaacaacacagcggatgccaacgccatcggaacccccgaccagatttgagaacgaggagtttcggacatccgttactctaacatgtgtcgtcacctaggttgaaatccaacgtgacgtcgctattcaaggcccaatgcccattttcctgcaagctgtaccgaacataggccggatcatgatctccgatgagttctggatcaaacaacaacggcccacgaagtcgatgaaaatattgcgccgcacacagaggcgaacggcttctcgccggcagtcgctaaattagtatttctaatagcgtccttgcacgtgcatctggcaggtcttccctcatgggggtgcttccggcgatcgcggctaggatcgtcctgcccaaccgctcctactagctcacctgttttaaccgcttgtggcctaatttgagtttcgtagtggcccgttatggagtaaggatcccattggttgcttgcttgcggaggctccaatgtgtcgcatccgcttcccaatgttggtaatggcgttcacggccgcaacatggtcaacttgccaagccatcgggtcttttcagactaaaccggcgtttcccgtggtgatggttggtgtagcatctccgtcaaccgtcagattgcccgatgtgtccgcacgcgatctcgttggcggctgcggtaggggtcgcatccgcgatcatcaaacacatggttgccgtggaccggccgatatcaggtaaggcatcggccagtaaaaaaatcctgtcgaagcccgttgcagtcgagccgggttgtaagagtgttgcattctgagactttattacgagagggcttcctcgccgactgaaactgccgcactggtctacggcagttaccggatgttgacaccacgaggcggttgcgccggtggcgccccctcgttgaggtgaggtaaggtatggtcgatgggtggtcgcttttggactgaccacggcaacggccttgccgatatgcctcgtctcccgagcttcgcccaacgcgaccctttcgatctcccacaggccggcttggttgcgaaagatcgcggcgatttcacgctggcgatacgcttgtttgatgaggcgcttcagcgtgacctgttctctgaggcaatttagtttgccggaaatcgggtgtgcggaaggggattccttgcaaatttgatttgtcattcacgcgcctttgagagctttggcgagggaccagatgcggccgccggcacgacgggagagcaggatcattccgcggctcgatcagatcatctgaagcatccgctggcggcgctggggcgcacggtggaattgggggttcctggaacgggagtctggggcggtctacaccgatgatccgggccgcccgccactgccgacgcgattgatggcggggctggggtgatcctcaagcgcgcctatgacctctccgatgaagcgctctgcgagcgcggggttgagaacccctactttacccgcagcctccacgccatgcacttgaaagacgtgcttggcgagagccgatggtggtaggatgcattgtggattactcctctctttgttgcttcggcaacactctgccacatttgatgccgtcgagtgggtgtcatccacaccatcatcgtgatgcttcatatgctgatagtcgcactgggattaaccgagagcgcgatcagaattgcttagtattgcgaatgcacgcgaaaactgagcaccgaaactgggcctcggtcgcgattgtacgctggatttgcgatgagctgatagtccagcgtaaccttcgtggaaaataccggaaaactataataagtctcgaatattttttcgctgcccggatttggcagcttgccatcgccaaccaggattccaagtccgccggcattgagaaacgcttggtgcacgccggaaatcccgttgacgacaccggctatgccgaacgtatcgttatcccgcccccactgctttccggaaatcgataggccggcggcgacggttcgatcgacgtcggtgaattcatagggctccttactgccatccgcgaccccggctcggacaaacaggccgacattggggatgagttgctgctctagattcatgctgatgccgccacggctttggtagcgccgcacggcggcgatatcggcgggtcctccgttcactgcagccaactggatcgcgtcctggaagcttcccatccggccgcgtgtcagaaatccgctgatcgcgattttcccgggttgatcccagatggcatatcgccgctcgatctcgccgacccactggaactgtccgaactgtgaatcgaggtgggtggcattcggtgcgatggatagatcgaataggccggcgcgcaaggtccagggaccttggtaccattccgcggccgcgccgacggtgtaagcccaggcgtcggccgcatagtcgaacgttccggtgtcgatgatggtccagttcatgaaatcgacgcgaggatcatgggcgtatttattggtgtcgaagatatcgccgacgctgaattttccgacagtgaacaccaaccgatccgaagtctgcgacccggaaaactggttgagcccggcatcgactttctgaacctcgccgccgaggtcgatggtctgtcgcaggaatgcccggtgcagacgcgtgtacgggtaactcgccccgactttgtaggcctcgccgcttgggaaacccgctgcgccgaccgatttgctcagtccaaagccctgatctatttccggattgacccatgcttcggcgccctcccagagccggacgcctgcgtacaaggttacgtctgcagtctcgcggccgatattcggtgcgagactgttctggccgctgtagggagcccgaaatggaggggcatactgattgacgtaggtggcttgggcgtggaacgcgacgcggtctgtttccagagcggatgggcccttggccaggaagtccgatatgtgagcgttatctccaccgatccggtagttcacaccaagccggacgctttgcatggcgaggtcggatgcgaacacctccgctgcggccgggaatgtcacgcccttgcggccaaatccagtcgacagatactcggcttttgcggtccagttgccggtgagcggaatctcgatgcccgctcccgcggcccaccccaatcgccacagcagcctcgtgtccacggttcccggcgttgcgaaaccgccagcgggaaaaccggtcacctgatcccgcgttgcctgattgtaggtccaggccaatcctcccgttccatagaggagaaaatgctcgaacgcgtagccgaggcgagcgcgggcacttccgtaatggatgaccgcctctccgtagatcacttggccggtcaagggcgaggtgaccgtctgactgccacgcacggaaaagggtacctgcacgtccgaattcggaaagctagcgtcggcctcgaaacccagcatccagcgagactgaaaaacgtaattatacccaccctgcagtccggcgaaatagctgcccgttccgcccatgaaatcgaaattgaacggaaaatcgaatgatccattcaaacctggaccgccggctcccggcgcagttgcggaccagtttgaagagcctttgatcaccccggcatgggcgccgatgtaccaaccgttccaatcgtaaccagtcacctccgcagccttcgagacgtagggcaaaggtgccttgaccggaaggtttacgggaaggtcacctgcgatcgcgacagaacacgtcgcaagcactatccaggtgccacccaaaaagttggacactcgcttcataacgcgccccgttacccaacgctaaagtagaccaaagaaagatgacatccatcccaaagcattattgcaactaattcgcaattgcaagaacgaatgggcattgagcgacgcccgcactcttcaatggacgagatcactgcttctcagacatggtgaagactgttattccaacataagtccgatccccaagccggttttggcctgcgtgatcagttgtcggatgatgatccgaatcggcggccgtaacgtcaaaaggcgtaacgtcaaaatgacgagaacgacataactcgtcgccagcccctgttaacggttcgatcaattgatgtgacatcctgctcgaccttttggcgcttcgctggccgctcagagccgaccatgcctccgaaccgctccagccatcgcgctacttataagacagctcgaagaccgctatgtgaatcctgcgctgtcgtcgcgtagcgaaagattgtgctcgccagccgaaaaactccaatggctccccgacatcgcgcattttcgacggcggtccgtatcacgctcccgccgctcggggccgaacttgttgagttgcggcgacggccaagcccaatcgcttgcaaccggaaagttgttcaatagccgctaagccaaattcgaaggctgtttgcgcaaaggcctcaagctgccagtgtcatcccagtcgcgtctcaccgtcgatcagggatcgttgacaaatgcgcatctgatccatcgcggtccgcttggccggagaacaatcaggcaggttcgcattgcaagcaaccgtggcgccgacgaccccaggatcgccttggatgaccgcaccgtcaggcatagaggaagatcaggaaatcccgggcaatgaatggctggactgacttgtcctgcagtccgccgccgaacgcgaaaatataactcatgccagtcaggcagcctagggtgccaatgaccctttgagaagtagtagcggatcgattcgacggcacttggtcatattagaaactcaagctaaattgaaactcggaaagaccgataattgtgctccctgataatgccgtacggagtgcattggagtgactagatgattgatccagctcccgagctcccggataacacgctgattgaaagtgtacgacttccgcagagaattcgaaacctactgaattcggccggtctaaaaaccgtcggcgaggttcgcgataaggcagatgctgaatttttaagtttgccgagtgtcgataagaattcgctgcaatatctgcgaaggaccctcgggcttccgtcgtcacagggagttagctgcctcccatcggagctgcgagacggcgatgatgaagtcaagtaaacgacttcataaacaagcatgactgttgctaacttgcgcgatcctttctcaagctgcgctccaatcaactttcgctgggcttcggcgcattcgcacatggaactatcggttgggtggcgtctgactgcagcggtgcgaacggcggtaatatcacctttcgaccgactggcgccgcggcattagcgcggatgtttacccggtccgtctcggactcactcgctcatgattctcaaccggccagtcacgggcccagatcgagacgagcaaggacgtaatctacaaagctgctccggaagaggtcgtgtaaggcaacgggccgacgtttctcgccggcccgatctgcgtcttactttatgccttcgtgctgccaatgggcagtgacttccgcgtcggattttgtcaaatggacgtgctggtcgacgtgatcgatccagccaacgggaataaaatgatggtgaacgccgtcgggcgaactctgtttggtcagcttgatcttgtcggagccttcaagatggtcgactttgccgactgtctttttgtcggaagagacgacgtccatgtgctctttgatctgcgaggtatctgtcatgggaaactcctttggtatagaaattaaaaactcgctaacggggattaggttgcatttctggaaagaacgtctcttacccaactcaccggcgcggccgacagagcggaactcttaatgtccgcttggatgtacacgctgatcccggccgtagccgtcgtggtcggcgccgccgcggcggtctggcggaagccgtcgcccacattcgctggtgctatccagcattttgccgccggtgtggtgttcgccgccgccgccggagagcttctgcccgacatcaaacaccgtcagtcagcttgggcagtcatcctgggaggggcggccggcattgtgcttatgctacttatcaagcgcctcggcgaaatgactaaaggcacgtccggtctcatcgtcatggtagcggtggatatcttcatcgatggactggtgttgggcatcggtttcgcagcgggcgcaaaacaaggttttttactgacggttgcgctcacgacggaagtcttgttcctcggcctttcattgaccggcgaactgtccgagtcgattcgaaagcctgcaaatgttctcgccgtcgttggcgggatcgcgatcttgttgccccttggtgcctccgtcggcatcccggttagccatcttccaaacttttggatcgcggccttcttttcatttgggttggttgcattgctatatctcgtcacggaagagctgttggtcgaggcgcattcggctccggaaaagccgtgggtcaccagcctgttcttcgtaggctttttgctaattctgctgttagatgagctcgcaggctgaacaccgatccgggtcgtcgcctgtcgcccccggagattaatgcgtgcaaacaagccttctacgtgagtggctcaccaaagtcgggtgggagatcgcgctggcggttgctctagcggcagtccttgcagtcagtacgggtggcacgctctcgcttgcccttcgttacctggcaggcttcagcggactgaactcgctcgtgcaggtagttctagccgttgcgcgacggcggccgctaagcgcgcgcctttcggagtgggacgaagcaatcgcgcttgcgacgctatcggctggatcccacctcatggccggccacatcgacacgatcacatgaaaaacgtgacgcccatcgcaagtgccgctgcggccatggtggcggtcgcgatccagccgagccccgtcaaccaaccaccgatagtgaattgacccatgatcttcgtgttggcggccatcagcatcattaaggccatcaccggcacggcgacgatgccattgataacggcgcaccaaataagcgccttaataggattgatcggggtgaagttgagcagcactccaacggccgttgccatcacgatagtggcatagaaagccttcgcttcttggggctggcgggccagaccgatcggccacttgcgagcttcgccgaccgcataggctgccgacccggcgagtacgggaatggcgagaaggcctgtggctaccacgcctagtgcgaagatcgtcgcagcgtaatttcccgctattggacgaagcgcctcggccgcctgggcggaagtttcgatgttcgtcacgcccgatacgttgagcgttgcagcggtcgtcagaatgatagtcaaggcgatgaagttagaaatccccatgccgattagggtatcaatttcgatccgcttgatggcgtcgggaccctgttcgggcacccgcttaaggacctgtcgctgcggcacggcgcgaatatcctccgcctcttgagaggcctgccagaacagcagatagggactgatcgttgtgccgaagacggcaacgatcgtctggatgtactcggttttccaggtgagcgacggcatgacgaactggcgcagcgcttcgccccagtgcacgtccaccatgaacaatgtcgccacgtaagcgagcagcgcgagcgttagccatttcaaataggatacgtatcgggtgtactgtagcaggacctgcaggccgatgcagatagcgccgaacagcgctacatagaacgttctcgaaccgccgaggactaaactcgtagaatcggccatggcacccaggtcggcgccgatgttaatcgtgtttgccgtggtcagcagcgcaacaaacgtttgtaggagccagtttggataatgttggcgcagattgcctgccagaccacggcccgtcgtccgtccgatcctggcgctgatcatctggaccgccgccatcagcgggtaagtcaataacatggtccagctcagcgaatacccgaactgggcgcccgcctgactgtaggtggctatgccgctcggatcgtcgtccgaggcacccgtgatgaggcccggaccgagggcgccgagcagccgcggcttgctgcggccgacgacgggactaggaccggctttggcggcgctttccgacgaattcatccaaccggcctcaaagatctcaaaaaactaggtccaattactctctaatacgctcaaggcacgaccaaagttccacaatggccaagacgccttcatttggaagacgaggttgtagaaaaatgcgctgccgccaatgtattttgctatgttctatctgaacgatccttccacattaggccgaatctagcaaaggttgacaggtggcgtcccgaagccaaacggctgtttttataattggacttctgacgatgaccgccttagtggcgaccgtcgccggtatcttgctacatcgcgcatttccagaccacccttgggttacggtcgttggaccggtaggcgcagcgttgacggtgatcgggttcgcaaagaattttttgcctaggtgacgcgccggtgcgtcgttcgctttctcgcctaaaaaaattcgcccggcgcaggaagtttttttcctcgtgggccgaattcgtttgcagaattggctagaaataaatcgccgaacgcgctccgcagtcgggtcggaggatgtaaatcggattgatggatgtgttcgcgtggtacgcagtgaattaaccgaaagccacccgcatcgttagcgaactgcttcggtatgtgaatgcgtttgagatgagtttccatcactatcttcagaacgccaagtaaacaccaattggtggtcgttcgtcaggacccggtagccttgaggttgtggcccctgcgcgatggagagcaaatgttgacctattcgcttggcttcctcaaggtacaaggagccgcctaccactcgatcaagaattaccgggcagtcgtgcacaaatcccagaatttcaatcgtgaacggcgctttgtcggtcattcttcgaatatgcggacgttaacagcccagttcaagccaatagtccaacacgatcgggacccaaactaccgcacaatgtttttcagtcggagagttctcgatggaacccccctgctgggcatcccgttccgattttcgtgaattgggggtcggcatccaccccagcgcgacttccgcccagatccctcggcttacaggcgcaccgtttttcaacttaatcgtgcgcgttggggccggccgaattgtcctaataccgcaccgcacccgaccccggttctaagaagacagcgctgtccttcagctatcaattggtctccgatcctgcctacaatgcccgactagaccaagtttgatcgttaagggacgtatgcattggagctctgaattgctaaataccgcggcaagacaggaagcccgagcacgatccgaaaggaacgattcccgctggcccgatcacccaaggaggtgtagccgccgcctccgcaaggtacgatccgatgcgtagcatattgttgaatcccgccagattgatccttttcgccctgaccacggcgctgggcgttgcggtatgcttggtcccgcccagtttcgcgcaacgcgatcctctcgatctcgctcaggccggcttcgttgcaaaggatcgtggcgatttcactgtggcaatacgcttgttcgacgaagcgcttcagcgcggcctgttcgctgataaacagcgtggcctcctgttgtacagccggggcgtctcttatgaagcgctcggaattcgcgaccgcgcgttgtcggatttcgacgcggccgtcgcgctgcttccggatttccctaatgtctacctctatcgagggatcatctggggcgagaagagcgaataccagcgcgcgatgcaggatttcctgacggccagtaaattgaatccaagcgatccgcttgctttcaataaccttggaaacgtctatgaaaaattgggagatattgatctcgccatcgaaaactttggccgcgcgatccgcttgcagtccgactacgcccaagcctactacaatcgcgcccatgcttatgtgttgaagcaagacgaagaacgcgccatcgcagactacgacaaggcgatcttgttgcagccgacttacgccgaagcgtatgtcaacagggcaatcgtgaaattcttgctccgagatgtccagggcgctctagccgatctggataccgcaatcaaactcaatccgcgcgacgtctccgcacggtcaaatcgagcaaacgtgaatctggcaatcgaaaaatatggtgaggcgttgaccgacttcgatcgcagcttggcgttggatcccggcaatgcagccacgtacttgggaagggggcgggcgcatctattctcaggcgccatcgacgatagcattgcggatcttaagacagccgtacgactgcgcccttcgaacccctatcccgttatttggttgcacattgcccgggttcataaaggggaatccgaccgcgaagaatttgcagcgaatgcaatggccgtgaaacgcggagcgtggccgggggcaatgctggatatgtacctcgggcttctcgatgcggacaaggtcaaagctgctgcccaacagggcccaagccgcgaaaagtccaaacgccaatgcgaagcgaattttttcctgggcgaactggcgctgcacaacggccaaatcgagcaagcgagagatgctttgcgcgaggtgacgtctacctgcggacctgcggaaacggtctacagcgcggcggtggcggaggccaagctgttaccgcggcaataaagtgccttgcgaaggccgggcttctaccacccagctgcgcacccgccgaagcgcacttcccctattgcttgacatgtcagtggaggcgttacaacggtttacgatgccgcgagaatggcccgcgccggtctaggtggtgtgaactctagggattcccttttaggagttttccagcacgtcttcccgcacgagcgctcggacctgagccattggcgcaagcggcttggcgacaagctggagctgctgctggccgagagcttgcgggtggcgcatggggccggcgcgttacgcagccaggacctcaagcgggtcacagtcgacaccacggtgcagccgaaggccatcaccttcccgaccgatgccaaactgcttcatgcggccatcaatctggcgatcaggcatggcgtcaggctttggaaatcttattctcgcgtcgccaattccgccgcgatgatggcgggccgctatgcccatgccaaacaattcaggcggcatcagcggcagttgcgtatcctgaagagccggctcggccggatcatccacgacatcggccgcaagatcgagaaccatccagcactagaagaggcgttcgccctgccgcttggccgggccacgcagatccgctcgcaacagcagcgccagcgcggctggaagctttattccttccatgcccccgaggtggagtggagtgcatcggcaagggcaaggccagcgcgccttacgagttcggcgtcaaggcctccatcactttatttcgtatgacctccgaacaacctacccaaaagaagccacacagaagcgcggcgtgctggacgtttcttcaaagcgagcggcgcgtggatcagtgcccgtcactctcgatcgtgaatacggcttcacgcaaattcatgcccccatgaaggaactgaaagaagatcatcactgcctgatcgagcgttcaaaagaaacggacgagtgtggcttctacagttaaagcagctctcgcttcgggaaataatactcatagataaaagcccgcagcgatgcgggcttttcgttcttatcgacgttcgtggctgttgtcacccaccccgatgctcacgcccgggacttgaataccgatcccaggctgtccgtgctgctgcgggcgttcctcgtggtgctctcgccgtggctcttgatgacggtcctgctgaataatcatggcgggtcggtcatgagggcgttcctcgtgatgttcgcgccgaggttcaccatggcgttcctgaataattacgacaggttggtcatgatgctgttcccggcaattgccatgttgatcacagaccatctggacgcgcagcaggccggtatcggcctgcgaaacgcccttggtaagggatcctgcctggacaccgctcacgaacagcccgacagcaccagccaaaagcgaaaacgtaagtgtgttcatattcattcccctttgtggttgatcgctactgccttgaagtaccttcgggcttcatacgactctcagtgatggccgccgtgatgaccgccaaagccgccgccgaacccaccatgatgaccgccaaagccaccgtgatgaccgccaaagccgccaaagccgaggcttatgcccgggcctccgtacccatatccatacccgccgccgccatagtacggctgtgcgtagtagggttgcgcgtagtagacccgtcgaggggcgtaatagccgtagctcctgtagacgcggcgatgcccatagtggcgatagcgacgatgggcactgaagtcggttgactggctcgttccgctggttgcggttaccgtcttcaccgagttgtcggcatttgctgcggaaccaccgagaagcgcggctgcgccgacggcaattacgatggctagtgttctcattttccactcctatggtgaactgtggaggggtaattgagtccggggagtttcgttccggccgtcaaacctttatttttgcgtaagtagttgaatatccattcataatcaagaacgtcaagcaaagatacggcctacccgtgtcctgtaccgtcgcacttcacgcatgggccgatcctggagcctttgcaaaaattgcacggcttaccctcataccgtttcccgcttccgtagcattcattgcaagcattgatcctttgccgttgcacctcggacatgctgccattgtccttcacattatttaggcgaaattcatttccgaccactgacgcgatttttcgatcatgttcaggttatcccatgaacctcaaactgatttaccgggctatcttggaaacccgactgctatggcaatcatcgagaccggctaatgccgctgtggacgccctctatgacttgctcccgcgccaccgatccgctggacgctctcgaaagagaagttcaaaagcctggtgctgcctcccctcgaaaataaagcgagcggaagcaaggtcgagtttgaattgtaactatctttgaatgattttctttagctgcgcttcccatttatccacgacctcacgcatttctttcgcgaagtcgtatcgccgatagactgacacgataccggactgactaccggatacgtggttcaacagacgttcggtaacgtgtatgggcgttccgagggccgcaagattcgtcgcgaacgtgcggcgcagatcgtgcaaggtccacggacgttctcgagagcgctagaagcccttgaattgcgtcccccaccccgcgtacgggatgatcccactgagcctactcgccggaaacacgtagccgtccgtttccggcaccgaagcaatcaccatctgcgccatcctccctatgggagcacgaacgcgcggccgtttttcgtatcgggcgaattgatcgtgccaacgccgagatattcccgctgcaccagttgaaaaatgtccgaatatctttgagggcatgcggcggcttccgacttggccgtaagccgccgcattgatcgagggcttctggggggcccacagcggcaaagctcgttgacgcaagctcgctaaatcgcgcgtcgaccgctcagtgcgacaagctgctggtcgtcatcatcacgtttgatgagggattttaatgggggctctgggttcagaggaatgctcccgaaacacacccgaaatcgccgggctcaacccggcaaaacaaagattcataaatatatctccatagcttatcgttcgcggacggacgctaggctagagattttcaccgatcgaatgaggtggatcagagcaccaaactattttcttatagtcaaagccgatctcgattgtcggtttgactacggcaaaaaaaggggaaatgtcgaaatcacgaggcgtgtagagtgacgagtcgcggatatgaaagatttccttccgcgcatgatcgctttccaacggagtaataacaggcaaaatggggtaaccaacatccatgaacgcttgggcgataagggcggaacagatgaggcgggtgggatcacccgaacctaacgcgatcattcggcgccgccaacgctttggcaccggaagcggcaccaggtaacgcccaagatcgatcagattcttgagatcgtatttgagcccgatccgcgcaactgcgaatttacataccgcttcgcagtcttcgggggccaacccgacgggtcgacatatacgagtatgaaatttggaatacttcgacagagagacgcaggtaatgccatagtccagattggactccaccaattcgcattcgcctggcaccgtcgatcctacgtagagcgcagcgtgagaccaggttgactgcgtgaggtacttgataattccggagatgcgattgttaccctcaatgagcaaaatatcgccgggtctaatgcaggcttggagcgctttcggatcggccggggtgaatggctcatagctggacgagggctgctgcagataggcggcgatcaggcgccccaggagatcgaggatccatttcatggcgccaagttccggttgctacatgggccaagcaagtcgagccattcatcgttcgatgacacaccaatgttagcctcctcgccctgtcaggtaaaatggcttgaagaggggactcgcaactagaccaccgatgggagttctggcgaactaatccggtacgttagccaacttgcttagctcagtcgggtcctgtaaatctttcaacaatttgctcgccaactcgtacgatctgttaatttcgatgagtcggctcatctctatggttggctgaacgttggatttttcagtcacgccctgcaaaaccgtcgccgagccagccttcaccgcctctggtacgcgatccgagctaaaaaggttgccgcccaccgcctgaatgtttgcccgcgcagaaaaactcgcgagtcgcaatcggcccagtccccaagcttggtcgaaatcctaccccctgcgttgatattgatcgctccagcttggacaggcacgtttaccgtgccgctgtcggctaaaaccggctgcccgtccatggtcaccagccggccagttccatccaggctaaatgacccgtctcgggtgtagcgttctccctgagatgtttgcaccacgaaataggcgttgcctttgattgccagatcgagaggatttcccgtcgtccgtatcgccccggctgacgtgttcgtaaaggcaaacgccgcatccaccagagagaggggacgctcaggtttaattccgatctcctcccccttttcaggcttcaaatattcatgaaacgaaatttgctgagcgcgaaaaccggtagtttcgacgttcgcaacgttgtttgcggcaacatcgagcctgcgcctgagggccatcaagcgcgagagatggatgagtgtagtttcgctcactgctgtcccttcggaagcgaatcacgcgccattcaattctctgatacaacgctgactgcctaaactccgcaatgcggcatcttgcagcgcagaccgagcgaacgatcaaagtgattacttgcgatatggttgcgtttcccggtactgcacgtcttgccagcctcaaaaatggttccgcatctctagacccgcagggtcggctctgccattcggatctcctcattctcgacctgaatggtcacgtgatcgatcttgaacttttcttccaagatggcctttacgcccttcaggaccgcggctgcgtatttcatgtcggacacgacgacatgtccggtgaatgagtccgtccccgatgtgatcgtccagacgtgcaaatcgtgagcggcaacgacgcctgggatacgcagcaacgtcttctcgagctccggtagatcgatttcggtaggtacgccctccatcaggatatggaccgcctggctcaacagcttccaggtgcgcggcacgatgaagaggccgatgcccgcgccgatgatcggatccgccagcgtccaaccggtgtacatgataattagcgccgcagcgatcacgcccaacgatcccagcatgtcgctgagtacttcgaagtaggcgccctggacattgaggctctccgatgatcccacagagagcagcttcatactgagaaggttcacgaccaatccgacggccgcaacggccagcatcgggccacccagtatttccggtggagagcgaaaacgttggtaggcttcatacaaaatgtagacggtcagcagaaggagcaccactgcgttgaccagcgcggcaagaatctcggtccgtagataaccgtaagtcttctgcggcgtagcagccttttgcgcgaaatggatcgcaaacagcgccaatccgaggccaccggcatccgtcgccatatgcgcggcatccgcgatcagcgcgagactacccgtccagatcccgccgacgatttcggctgtcatgtaagtcaacgtcagcgccagcgccgcatagagcggcttgcggtgacgtcccgccgctgacggaattgcgcctccgtgcgaatgacctttacccaccgcgatactcccaagttttgcgaaatcggtcgccagccggcacagctagggcaaggcggttgtaaaatcaaatttccgaaaaccgaggagttcccgggccttgggctaacattgtaatagtgttcgccaatggaatttgctaaccggagaatatggaacgtcaggtcggtcaaagattgacaagactgcaggcatccggacttcgccggacgctgttgatgttgcttgctttttcctatcttttcgtcggtctggcgcattctatttcgtgcacagacgaggctgtcgcggccactatgtcatctgacattggcagtatcccggacaatggtccggatgaggatggctcgaagaaatcgcccgtggtcgccgggcattgctacgtgtgcgcaccggtgctgatgcccgccgtcgtcccggatgcggggccttccgcacgtccggtcaaactggcattcgtatcgccaaagctccagtttgaagaccatcctcggcttgatacgccgccgccaaaacatctgacctgagtatcgccgctgcgcggtctggccgcgccgtcgttcttcgtgcttttcaggtcgtttgtatgtttttggtccgagatgctctgcgcctgacatgcgcatttcttgtatttacaatcccagtccaggctgccgaacgttcttcgcgcgcaatctccctgccgcaggcattgcagcgtgcattggcggcgaacccgcgcttgacggcggccgagcgcgatatcggcatcgcggggggacttcgaatccaggctggtgtgcttcccaatccagatgtttcgttcgaactcgacaacgcgttggggtcggggcgctataagggcttacgctcggctgaaaccaacctgcaactcagccaactggtcgaattgggcggcaagcgggaggcgcggattgcggcgggggaggcaggcatcggcgccgccgtctggcagcggcgggcgacgcggctggaggtgttgtccgagaccgcgatcgctttcatcaccatcatcagtctgcaacgccgcatcgaaatcttcgacgagcagatcgcaagcttcgacccgcttatcccattgctgcaaaagcgcgtccaggaaggtgcttcctcgccggccgagactctaagggcgcaagttgcagccgaccttttccgcgtcgagcgcgagcgcgccaaaacccagttggccctggcgcgccgtgatctcgcgatactcatgggcgacagcagcccgcacttcggcaatgctgtcgggcggctcagcaatattggtcagccgccatcattccaatcaattgtccaggccatcgaagccaatccgcagttattgcgctggaccgcggtcacagcacaacgcaatgccgaactcctcattgcacgtctgaaagcaattcccgacccccgcatctcggctggctggcgccactttgaggacaccaacgacaatgcggtccggcttggtgtttcgattcctattccggtgttcgaccagaataccggcaacatcatcgccgcccaggaatcgctcgcgaagaccggcgcagagcgggcgatcaacaagttggtcctgatcagcatcgtcggccgggcctatgacacgctgacgggcgccctggccgagattaaactgctgcggtcttcagtcattcccaatgcgcgcagcgcttccgagacgatcttcagcggctattcgcaaggccgtttcaccctgctggaactgctcgacgtcaggggggcgctgttgcaggcgctgctgcgcgaacaggaggcactgcagaatttccatgttgccatcgcgaccatcgaaggtcttgccggtaatccgtttacgctaacccgcgagagcgcacgatgattaagggactgatccgttattccatctttatcctgctggccgcagcgctcgcctatggcggctaccggatgctgctgccggcgacgtcgaagacgacgccggccgaaaaggccgagaaggaagaacattccgatagcgtcgccttgagcgacgccaagatcgaggcggccaaaattgaactagcgaaggcttcacccggcgtgctgagggacagcctcctcttgaacggcatcgtccagccgaaccaggaatcgctcgtccaggtcacgccacgatttcccgggatcgtccgcgacgtgcgcaagcggatcggcgatgtcgtccagaagggtgacgtcctggcggtcattgaaagcaaccaaagcctaacgcagtatgaactgaaggcgtcgctggcgggcaccgtcattgatcgccagatctcgctgggtgagttcgtctccgagcagaaatcggcattcgtggtagcggatttgtcgaacgtctgggtggatttctctgtctaccgccgtgatctgaaacgcgtgagcatcggtgatcagatactcatcgatcccgccgacggcgggccggcgatagaagccaaggtttcttatttatcgccggtcggcagcagcgacacccaaagtgcgatcgcgagagcaatcgtaaccaattccagccaacgactgcgcccgggactgttcattaccggacgactgacgttgtccgcaaaaaaggtcggcgtcgcggtgaagtcgtcggcgctgcagacggtggaaaatcgcacggtcgtgttcgtccgaaacggcgagaaattcgaggcccgcgacgtcgaggttggcgaccgtgatccgcagatcgtcgaaatcctttttggcgttctcgatggcgatgtctacgcggcgcagaacagcttcatcgtgaaggcggagatgaccaagggagcgggcggagatgagcattgacagcagcaagacgttgattaccgcgttgatcaggcctcacatggaaggccacgtcgttcgcgcgctccatgaccttccggattttcccggcttcaccttcgacgaggtgcgggggcaaggaaggggacgcggacaagggggcagctatgtctcgaccgatacggacctgacatatcaccaatacctggaattgaggctggtctgccggtccgaactggccgacgagatctgcgggctcatcgccacggcagcatggaccggcaggaagggcgacggcgtggtgttcacgacgcctgtccacgcgtttgcccggataagagagatcggccgccgcccggagaagtccgatgcttgaagcaatcttatccttcgccatccgacaacgatggcttgtcatgatcggcgtactgatcatggccgccttcggcgcctggaatttcacgcgcctgccgatcgacgccgtgccggatatcaccaatgtccagatccagatcaacagccgggctcccggctattcgccgctcgaagtcgaacagcggattacgtttccgatcgagaccgcgatgggagggctccctcatctcgagagcacgcgctcccagtcccgttacggcttgagccaggtcacggtcatcttcaaggacggcacggacatctattttgcccggcaattggtcaacgaacggattcagcaggtcaaggaccagcttcctcccagcatcgaaacggccatggggccggtgtcgacgggcttgggcgagatttacctgtttaccgtggaggcaaagccggaggcccgcaaggcgggcggcggcgagtacacgcccagtgatttgcggacgatccaggactggatcatcaagccgcagttgagaaacgttcccggcgtgatcgaggtcaacacaataggtggcttcgaaaagcagtttcacgtgctaccggatcccgctcaattgatggcctacaagctcagttttcgggaagtgatgacggcgctggcatcgaacaacgccaacgtcggcgcaggctatatcgagcgtaacggcgagcagtatctcgtccgcaccccggggcaggtagcgaatatcgaagaaatcaaggaaatcgtgatcggctcccggaacggcgtaccggtcagggtttccgacatcgcggacgtcagggaaggcaaggatttgcggaccggcgcggcgacagtgaacggaaatgaggtggtactcggaaccgcgatgctgctgatcggcgagaacagccggacggtggcgcagcgggtggcggccaaactgaagcagatcggccgatcgttgcccgacggcgtcatcgccagggccgtttacgaccgaacacgactggtcgaagcaacggtcgcgacggtcgagaagaatctggtcgaaggcgcgctgctagtgatcgtgatcctgttcatgatcctgggaaacttcaaggcggcgattgccacggcgttcgtcattccgctgtccatgctgttcaccatcaccggcatggtcgagaacaaggtcagcgccaatctgatgagtctcggtgccatcgatttcggcatcatcatcgatggtgccgtcatcatcgtggagaactgcctgcgcttgctggcacatgaacagcagcgattggggcgcgtcctgaaccgacaggagcggttcgagacgattttggcggcatcgcgggaagtcatcggcccgagcctgttcggcacgctgatcatcggtgtggtctacctgccgatcctcacactcaccggtgtcgaaggaaagatgttcacgccgatggcattgaccgtgctgatggcgctcaccggcgccagcatcctgtcgctgacgttcgtacctgccgccgtggcccttttggtgaccggcaaggtgtccgagcatgagaactggttcatgcgcggtgcgcgtcatgtctatacgccgttgctttcagcctccattcgcaacaagtacggcgtcgccgtgatcgcagcactgttgatagtcgtctgcgggatagctgcgtcccggatgggcggcgaattcatccccagcctcgacgaaggggacgtggccctgcaggccatacggatcccgggaaccagcctgacgcagtcactggaaatgcaagcgatggtcgagaagcggctgatcaagattccggaggtgagggaagtgttcgcgcgcaccggcaccgcggaggtcgcaaccgacctgatgccgccgtcgacgtcggacggttacgtcatgctgaagccgcgaaaagaatggcccgacccggaaaagtcgaaggccgccgtcgtgtccgagatccaggaagccgccgaagaaattccgggcaacgtctatgaaatctcgcaaccgattcagcaacgcttcaacgaactgatctcgggtgtccgcagcgacgtcggcgtgaagatattcggtgacgaccttgatgtgctcgtccaaactgctgctcaagttcaggcggtccttcaaaacgtccagggggcggccgacgtcaagaccgagcaggcttccggactcccggtccttaccgtgaagctcaatcgtcaggccttgtcgcgatatggaataaatgtcggcgacgtgcagaatctggtcgaaattgccgtcggcggcaagaactccgggatggtcttcgagggcgaccgccgtttcaacatcgtcgtccgccttccggagcatctgcgctccgatatctccgcactgaaggcgcttccggtgcctttgcctccgctggagaacccggcaaaggccattcctgcgaggctcggtaattctccgttgtcccagatccgatacgtcccgctgtccgagcttgccgagattgatgtagcgccgggtcccaaccagatcagtcgggaagacgggaaacggcgaatagtcgtgacggcgaacataaggggccgcgaccttgggtccttcgtcaccgacgctcagagccaagtggagcaaaaagtgaagctgccggcgggctactggatcgggtggggcggtcagttcgaacaactggtctcggccacgcagcgcttgaccatcgtcgtaccgatagccctgcttctgatcttcctgctgctcttcatgagcctgggatcgatgcccgacgcgctcctggtgttcagcggcgtcccgcttgccttgacgggcggaattatcgcgcttctgctccgcggaatccccctgtcgatcagcgctggcatcggcttcatcgcgctgtcaggcgtagcagtgctcaatggtctcgtcatcatcactttcatcgaaaagctgcgcaacgagggtcatccgctcgtcgaagcggtcaaggaaggcgcgctcactcggctgaggccggtcctgatgaccgcactggtcgcatctcttggcttcattccgatggcgatagcaaccggcgccggcgcggaggtgcagagaccattggcgaccgtcgtcatcggcggaatcatctcgtcgaccattctcaccttgttggtactgccggccctctacgtcctgttcaggcgggaggacctggagaacggcgaatcgaaatcaccagccaccgaaggagcaacgtcatgaaatacgcgctgttgttgattgccagcctgttctttgcagccccggcttttgccgaagagtacgaaaaagggccgaacggcggcctgatgctcgatgtggcgggtatcgacgccgaactaatgacttccggcaattccgtcacgatcaacgtcttcgatgcgaagaaccatacgccgatcgccaccaagggctacagcgccgcggtgctcatcgtcggcggggcgggacgggagaccgttacgcttgcccctcaaggcgagaattcgctgaaaggcgatgcaaagaacccgatagcggcgggcgcaacgatcacccttacgatcaagacggccgaaggaaaatcgggacaggccaaattcaagaagtagaagccgatgtgcaccaggacggcgggatgttgaaccaattaagggctatgtacggtcgccgccgcatagttgcggcttacctaaatatgagcgcagtcggccggggcgccggccgtttactctttgtcgtggcgctgtccttgatcgccgtcctcgcagctgacgcgtggcgcggccttcgagcggaggtgccgaaagcaagaattgtcggcctgggcgccacaacatgtcaacggttcaacgacgacgtcaaatccaatcccctgcttcgccgagactatctagcgtgggcgcaaggttttatgagcggaatcatattgagcaggccgccgggtgtcgatgaggggttggatctcaatccagtaactttcgacctcatcaatcaacttcacttcctggaagatcactgcgcgcggaatgtctcgctggaattttccgacgctgtcgaagccctgtacaaacggctgcgtcaggaaggcaagacgtgatcggggaactgccctgcaaatgctcacccgcactacaagaggcctgagtcatgaccgacgcgccacataccgtcaaagttcgtctccgtgtcgaaggcatggactgcgcctcgtgtgccataaagattgaaactgccctgcaccggttggctggagtcagcgatgtggtcgtctcggtgcccgctggcacggtgatcgtaacgcatgatcgaagggaactggaggacaggatccgtgatcggatttccggccttggttaccaggtaactggtagcgaacagataggcgtcaaaacgcctccatttaaacaaggatgtaataatcaatctagcgatggtgggcaaacccattcgcacatccacgaccacacttcgagtggtcagctttggtggcaaacccgtaaagggatgcttaccatcgcttccggattgaccttggcgatggcctacgtgcttgggaagttgatgccagcgacggagcgttgggcctttttgctggcaatgctggtcggtctgatcccgatcgcaaggcgtgcgatctcggcggcaagggcgggcacgccgttctcgatcgagatgctgatgactatcgctgcagtcggcgcagtgatcatcggagcgacggaagaggcggcaaccgtcgtcttcctgtttttgatcggtgagctactggagggcgttgccgcaagtcgagcccgggccagcattcaagatctgaccaggctcgttccgaaaacggctcgcctcgaagaaaacggtcaagtccgcgaagtacccgcggacagtctttcagttggcgctaccatccagatacgacccggggaccgtattccggcggacggggtcatcttatccggagagagcacaatcgatgaagcgccggtgacgggcgaaagcatgccggttcgaaagggccctgacgaaaccttgtttgccggcaccgtcaacggcgatggtttgttgcgggtgcgcgtgaccgccgctgcggcggacaataccatcgcgcgcgtggtgcgtctcgtcgaggaggcgcaggagtcgaaggctcccacggagcgtttcatcgaccggttttcccgattctacacgccgggcgtggttgtggtggctgcattggttgccgttttgccacccttggtgttcggcggagtctggtctgcttggatctacaagggtctggccatcctgctgatcggttgtccctgcgcgctcgtcatctcgacgccggccgcgatcgccgccagcctgtccgccggcgcccgccgaggattgctcatgaaaggcggggcagttctcgagcagatcggcaaggtcaatgtcgcgtgcttcgacaagaccggcacgctcaccgccggcaagccccaggtcacggacatcatcggcttcgcgcgcagcgaggctgatgtcctgcgcttcgcggcggcgcttgagtcgggatcaagtcacccgctcgctaccgcgattttgtccaaagcagcggagcagcagatttcgattccctcaacgtccggctccaacgttatggggggagttggcattcgtgccacagtcgagggggtcgaggtcttcgtcggatcgcccaaggccgccggtgaaggcgccttgatgacggccgagcagagatcacgaattgtcgatctcagtcatcaaggaaagtcagtcgcactggtcattgttgaacatcaagttgccggagcaattgcgatgcgcgacgagcctcgtccagacgcccttgccggactgaaggcactcaccgatatgggtattaagacagtcatgctgaccggggacaatcggcactcggcctcggcaatcgccgagcaactcggaatcgaggtccaggcggagctgctgcccgaggaaaagcagcggatcgtcagccagtatcaaagagccggctggtctgtcgccaaagtcggcgacggaatcaatgacgcaccggcgctggcggccgccgatgtcggcatcgccatgggagggggcaccgacgtcgcgttggaaacggccgatgcggcggtgctgcacgggcgggtttccgatgttgccgtaatggtcgacctgtcgaaacggactatgaccaacatccggcagaacatcgcggtcgcgctcgggctgaaggccgtctttctcgtcaccaccatcgtcgggctaaccgggttatggccggccatccttgccgacacgggcgcgactgttctggtgacgatgaacgctttgcgcctgctccgcttaccccaaccgagccgtccaagtctttaggaaacccgcaattgagtgctttctcgtggcttcgcaccctcagtaattccatgtttcaaacattgagccggttatccatgccagaagggacgcaccatgcggcggccaaactcgcagtcgtcgcccttgtcttcggggtgacaacgggcgccgcattcgcagctacaggcgagtccggcgggactacaaggttcgatttggcgctgcttgtccggatcggagttgccgtcgcgctggcctttcccattggatgggaacgtgagtttcgcggttcggaggccggcgaccgcaccttcatgctcgtcagtctgggtgcagccgcatttaccgccgttggggttgagaacttcccggcgaccgccgagaaggtgatggcgggcgtcgttactggcgttggatttctgggtggaggtatgatccttaaggacgggggcaatatccgtggcttgactactgcagccgccatttgggcaacggcggcagtcggcatgctcgctggggtcggcgaacttctcatagccggacttgtgaccgggatggtgatcctgattcttgagttcgaattcctacccgtgatcggccggctcgacgcccggcgctggcggccaaagaaaatcgaacgggaaggaaacggacgtgaactctaatggaaacagtacgcacgcgccagaaacgaagcggttgcaaccattttctaacgcttgtttgcaaccacaaagccgaatgtcgacgaattttacgctttcggaggaacgatgaccaacaccagcgttcagaacaatctgccggaacttacggacggaacggacaaagatcaattgtccaggccgaagtgtggcttaggctgaatgggcctgcatcctcagcgttagcagaacagattttttatctagaattaccttccctctcaccttgaacaactcaatcttagcacatgatttaataggagacagacaatgggtttcgatcagtatcacgaaccggcggatgaactttcgcaggaaactcggacctttgcgcgaatgataacatcactgatcgaggaggctgaggccattggctggtacgaacaacggatgtcgctcgaaaaagacaaggaagccaaagccattatggcgaacgcgcaaaaggaggagttcaagcattttggcatgaacctcgaattccttcttcgtcgcaacgaagactggcggaccgaactccaaggcatcctattcacgaagggagatatcgtgaagcgcgccgaggcggctgagaaaaaggtcgattgatccctcttgaggcggtttcgatggtggagaaaaggattatctcgcggaagaaggtgttgaaggccggcacgatcgcgttcgggggtgccgctataaattgcaccgtccgaaatttgtcggccacaggcgccatgctggacgtcgagagcccgctcgggattccgagacaatttatgctggatatcgcggcggatcactttaggcgtgagtgtcaggtagcctggattcaggaaaggcggctcggggtcattttcctggtcggcgccaatccggaaagctgatgtatttcggcggatcgtaggacgtagtgatgttgaaattcgtcgttgggctgatgttttgcctcgccgcggccgatgctcaagccagagcctccggcatcgcacagggcggatggtccaacctgtcgaccgagcaaatgagccgttttccggcggctgttcgtcttgcgctcaaagacgcgcagaatctatgtggcggcgaaacgacgagagtccggactggatttctacggtacttaccgggctctgaggggcaagaattcacgacgatccacttcgaacactttgattgctccggcaaagatttgctctgctcgacgagcgggtgccttcatcgactgttcattacgacaagtggacgcatgcgcgagatatggcgaggcaatatccgcgagattgatatgtctaacgaaaatggcattccgtcgatcgactttgactgcggccgaggtggctcattttgtcactttcggagaaagtggaatggcacgcggttgcaatgagtatgcgacgccttgcccaccattacgggctggtggatcctgctggggttgggctcaacgactcggttgctgtgctcatgccttcgggaaatctaggcgaagatcgcatgctggaacgacgcgaagactagtgacgacgatgcgatcgaccacgccacgttacaaagtgaagctaggaaaccacgagtttgcgtttgatctggacaatttcgtctacggaagctggaatggatgagttttcaggcggcggactgtccgcggcctgggccgcgcgccgcaaaccccaagagtggattgccgctgggaaaggaacttcgatggtaatgcccgtgagatggatattgtgtgccgcgcttaccagctatgcgaagaagcaggacagccccagggcagggaccaagagtttatcttcatgcggagcgagagatgcagggaagttctgagaagaacaagtcgtcggacgagcaggcggattagctaaagcgggtctggccgtgcgaaagaaattccatttcaacaatacgcgtagttttgtggccgacacgggcgctttgcaattggccgaggcggaatcacattcgcggcgctggcctcagctagatttagacgccggacagcacaacccaggaaggccccggatctcgccgaggccgttccagcgctaacgacacggctctatttttgagaatgagagtgcgctgtcgtcgtgtgtttatgagcttgttcgctgtgctcgtgagccgcatttgcgtgatgggtagcgtccgcgtgctcgccgcgcgcgtgatgatgctcggcctgatgatggtgatgggctgccgcatggtgatgggcggcggccgtgtgatgatgctcttgagaggggtgcttcggtgattgtgccattgcagttcctgaggaggtggttgatgtgactccaacaaccactgtcgcggcttttagttcctgcgggacagccggaggtcgcaccagcgggtgctgcatcgcatcaaaagaatgacgatctggcgtcgcaggacctcgtcttatagtagcggtgtcggccaaagaaacgcagtgcgccgaggggtttgtcgccagctgttagcaacgattgccttattcacacgattgcacgaaacctaagatcgcaaatgaacacgatgacgatcaatggctatttggtgctctccctcccgactcgaatgtcggtatcggtggttgcgcctccccgctttttaccttcctccggcccgaatggcctggggccaaactggatttcgcagccggcggcagctccgcgatccccgagattctgcgccagcgctggattattttgattattttggtgagtttgtggtgagtttttgctttcactcactttaggacgcttgcgctaatataaggcattgattttgtggcgtacccgacacgattcgaacgtgtgaccctttgccttcggagggcaacgaaggacgtcacgaccaaagggacaacccatcgaacggccagatctgcgatatcgaagttgccggcggcccagttctcgcatcgcgcgcgcgagcttgaggatctgccgcgtcgccaaatgggcaaggggcaaggggcaaggggcaaggaacaaggaacaaggaagaaggaagtaggcgacggggatacaacagcctcgggtgaagaccttggcatacgtccccccggacccagacgtgctctgagcctcccggtgccagccttttcgatcattggctgccgcgcggtccttttgaccgttccgcgcgccacgatcttaagtgcgtcatcggcagcggtcgttgcagcaccttcgccatatcccagggcgcacacagttatattataggaatatattccataatgaaggttatgcgaatccgtgatgagtcgtagaaggaaacgggccaccatgcgacacttagcctatcttgaggtcgagctcttgctcgattcgcgaagtgtgcgaggccgtgagggagtctcgagctgtgtggttacccacctttttcagcgaagcgctccactctgcaacgactgagcatcccagcctttcggactcagcggccacgacctcgacaacacgaatccaatcttccttgcggaacgtcttccgcgctggattgtaacgcggtgcccgcagtctgccgcagaaatcctcgtggaatgcaggcagcgccaaggctggaaaaacttccatgacgtagaggccgacagccgccgaacgcccgcgttcaggatcttccgttgcgcccatatccctcagaaaactccagatgggagctccgtcgtcgaacattctcaccctcgcccgattggcaggctgcacaccacctccaagccaggaaataaccgatgcaccaacgcgttcggccggcctcatactcgactgattgggcactatggtcggctggtcgatcgcaaccagtgtcaattgaccaagcccgtggatctcacgaacgaaatcaagcgcctggccgaaacgaactagctccttgaaatcgccaaaccgcctgccgtcgtagacgactgaacagatcgcgcctggcaatgtcggattgtcagtccatgctgaatcaaatccgacaaaagttgctgccatcagggtctggagctgccatttgcagactccctagcgaaatcaagcgccaattggaaacgaacacgcgtcgcttctcgcagccgccccagtttgaaatgatccgccatcctgtaaagaatatcgtcatctgccaatcgcacccggataaacggtactgcaaggcttgcaagctcggcaatcggaacgtcgacatgcgaacggacgtccggttgactggtccgataggttacgagccccgacgagcttgagccatcgccccaaatcactgttcgaccgtcgtcttggctctttcgatattttttcccaatcactctgccgacggccttttgtattcgatctccggaacgttgaaatccgtgcgcccgggcgatccgttcgacgagcaaattttcgtatatcggggattcgtatttcagtacgtgcgctaccatgctgctcaataccggttcataatcgcggtcgtagaaccgtgaggcatctggcttcaatcccagcactgagaaattggttgcgacgtattcggccccatttagctccatgttgggacgagtttctggtttcgcaccgaaaccaaggggcaaatgggtctgcttcgcctcccacttctcttgctctcccgcaagtgagaagtcggcttcagcggtgcccgacgaatgatcggcaagcctgctcacaatctcacaaatccgatcaagataccggcctttctcgaccggatttgtcccctgacgaagatagccaggcactttttcaaaccactcgtccggatccatgaaccgctgccggacgaacgtctcgatcatggcctcccggaggatggaccggtgcggctcccagtcgaccatttcattgccaaccacgtggtcacgaaactggcgcagcgcctcgaagcattcggcttccgtaagcgatgatttttcctgcagtcccgcatccgctttcggctgcactgacggttcctcgccccgtacttccggagcaggcggcgcgtctggcgcgggcgtctcaacatcggaagcctccgacgccggctgggccgtctccgttgtaccggcgggctgtgccgcctctgttacaatcgtgtactcggatcgatcgagagccggcttacggagcagtagctccagcttctcgagaagccgggtggtctgaagcgacggattgtcgaaccagtcggtcgaccaaattcggacgatatcccagcccttatcattcaggacctcctctctcaggcgatcccgatcacgcgcgctcttgctgcgatggtaggtcgcgccatcgcactcaacacccgcaagatagcgctcggggtggttcggatggcggacgcccaggtcgatcttgtacccggacactccaacctgatagtcgacaatatagcctcgtgcccgcagtctatcagccacttctatctcaaagtcgctgtcggcatccgttccaggtcccgaaaggacggaaacacgaccacgtgtttctgcgtattccagatatctacgcaacacgtgaacgccttcggagctttccggcgtcggcactacgtcggtcgatccaaacgaacaaaatagaccgatacgcgttcgcgcccgcgaaaacagaacgttcaaccggcggtgaccctgcttgcggttgatcggcccgaagcgctgcttgagcacggtggtacccacctcggggccatatgtcatcgagatgaaaatgaagtcgcgctcgtcgccctgcacgttctccagattcttgacaaacaactcctcgcccttgctcaacaccttctcgcggtactggtcgaccaatacgtcatccgcgataaggcggttcaactcctgctgaatcaggtcacgctgctgaatgttgaccgccacgataccaagcgacgggatttcatcctcatcaagggccgcatggtgccgcatgaaggttatggcttcttccgctacccggctcgcctccgtaggattgcacctggcctggaatgtcccctgtacccgcacgaggtcgatcgaaaacgaggacggcttcgacgccgggaaggtgatcagttcacgacgatagaactgctcgttggagaaccggatcagactctcgcagcggctcctgtaatgccatcggagcgggcggcgttgaccgaaagtcttctgacagctttcgagaatggattcatcgtcgaggtcctcgaagtcatcgtcatcgcccgaccctccgtctccggagcgcgcgaaaaagtccgtcggaggcaactgcttctgatcgccgaccaccactatctgtttcgatcgaagcatggcgccgagcgcgtcctcgggccgcatttgcgaagcttcgtcgatcacgaggatgtcgaagctcaaggaccctgccttcatgaatttcgcaagcgacagcggtgacatcatgaaacacggcttaagcgcctgtatggaattcccggcctgagccagcagcatccgcagggggacaaaccgtttttgcttggcgatttcgttcccgagaagcgccatctccgtccatgttttcttcttgccaaagttgaagccgggcagcggcctcttcgtaagcagctttgctttgatcctcagccggtcgtccttgatcttggagcggtccttttcagcaaactgcttgcgacgggtctcgagtgaggagccggtgttgtcttgaagggcctcggccgaccttttggccaattccgcgcctcggcgcgcgagcaccgcctcaagcagttgcgggagatgtagcggctcaatccgctctcgatcggcacactcgagaaattctcccaagccgagcgattccaagatccgccgctgccggtacacggcaagcaactcgcgcaattcctcttttcgctgaagaagggctgcgacctcctccgaaacgattccaggctccaaccgagcgtaggcgaccgccccaaattgcgagttcaacagttcgacctggccgtcgtagatggaaagcgggcctgccgcccggtttgcgagggatttcagtcgggcgaactcgtccgccgccgtcggcgaactcaatcgccgaagcagatttccgggcattccggccgacttaacggcccgaagccaatcaagcgcagcgaacgccttcgctactccatcccggatccctgcaaaatgctcaaccgcgaccttgagcggagaagtgtccaggatcgcccgaattctgccgcgatcgagctcgagcttcgcgatttcggccagttccctgagcggaatctcgaaccccgccaaggcgccgacttcctcgacagccacgacccggcgcatcaactggatttcgttgtccagcatgtcaatcgtgagatcgacggatcggtcatcaagacgggctgctcgcgccgatatgattttgcgcaaattggtagccggcgcttcaaagttatgaaggcgccgcacggactcctgcggaacctgaagcaggcgtagcatcaaatcgcgcccgacttgctccgtcaggtatcgccgcacccggatgccaaaatcgatcagatcgaacttagtatccaggccgagccagctagttgcaagaagacgctctgcgctttcgcctgcttcgaatgcgtcgattgcgtcgacgtgaatggccagcgctgccaaatcatcggcgggcttttccgaatcggccagacccaaacgggcgacgaggtcgcgaacaggctttgcggatccgcttatcgcggccatcgcacgacccaaattgccttttttcagaagttcggacgcactcctcaacgtgcccggggcgggccatgcttcccgcccgtaagcagaaagatactgcctccattcccgctccttcgcgatcagggaaacccaccgctcgcgaagaggcccgaacgtggcctcgtctactgactgatttaagtagagcgcggaacggtgctcctgagatatcttggtcgatgcgataacggctttcgcaatcgcatccaacgatgtcgcagggcactttccattgagcttgaatagttcgagaaccggagaaaactccgcaatcgcattcctaagcagaaggtccttctcgacagtctcgttggcaatgcggatcaggcccgccggcgtggcctcaaaatagatttcctgcagcggcatccgtccgagttcaaccgccgcccggagcacgccggcgctctgcgctccgatagacggataggccgcaagcgcccttacgacatcgtccagttttctttgcgcattgagagcttccgcaagctgatccggctctagctgcgaaaccactcctaccagttcgggaacgggcccgtcatcaagcgcctcaccagcccgtacagttgttcgcaggtcggcaatggatccgatttcaaagtcggagttgtccacgatgcaggaagaaagcgggcgcgccgacccgtcgattttgacgaggcaagcaagcagatcatcaatctgcacgctttggacattgcccaacccggccttgctccagagcgattctgccggatgcccaaacgaacgcaagaacgtttcactgtcgccggcaaatcggccaagatcggcttcgacttgcgaaagattgtcagcgctgttcagcaaatcgaccggcaactttacaacggagagagcttcaacggcgaccgagttcaaggtcgatccccgcagtgcctgccaaatcaagtcaaacggggtccgaccgctcgcctgaacagcatgcaaggcatcaaggtacctggcaatctcgagcttgttttcatgcagtgaacgaccaggcgccgccggcaccgcaatcggctgaacttttaaccgctcctcgatgctttcaagtaccgccttgggcgaagccttgtccgaatgaagctccaggcaaaactcaccgatcccggcttttccaagcctacgcttcacgacctccaacgcagcctgcttttccgccacgaagaggatcgtcttgttcgctgccaggccattcgcaataatgttcgcgatcgtctgcgacttgcccgtcccaggcggaccatggatcacaagattatggcccttcatcgcgtcgatgagggcgctatgctgggacgcatcggcgtcttggatcaaaaacggtgcgagcgcctcgatttgcgggtcatcaatcgagtagtccgtcagatcgcccggaagcagagcgccatctcccgtgtctccggtcgcgtcggtcccgcgcaaaatcgccccgacaagcggatgatcaacgggatccacagcccaattgtccgggctcaaatccgcgtataccgcaaatctaccgaacgcaaaatggccgaggaccatccatcgatgtatctgccatcgtccgagccccgtgatggcttccctgacgccgtcgaaataggcctcgatcgagccgacaccgtcctcgtcgccgttttcaaacgtcggcagcttgcggtgaaaagcgacattggtctcgaggagcttttggaggctgaggtttgattccgccgatccctcgttcgccgacaacgaataggtgtttttcccgtattgcttttttacgtctaccgtcaccggaagaagcaacaacggtgcgaaggcctttttgtcggatacgtccgactcgtaccattcgagaaaaccgaacgagagaaacagggttgaaattcccatttcctgttccgcaagcttcgcatcggcaactatcttccccataatccgatcaagttcgtctggaaacttgagcgtctgaagcgccccgtcactgtgcgaggcctttgtcttcacggggccgagctcgaaatttggatcgatgccggcctgacgggcgagatccgcccggtttatttcggccttctttgggcgtgaagagaatccgaactcgcttctgatgtggtcgcgaagctcgcgttcgagtttggccaacgccaattcatcgtcacgtccggcgctttcgagcgcctctaacttcgtcaggtactccagattcgagaccttcgcatgctcgagagcgcctataaactcctcagttttttcttccggtggtacgtcttccggttcatccaggggctctatccgaagcgttgcgtcatcgccggccaacttcttgtagatctcgtccatcacctcgtcgacgatctgcaggtgcctcttggacctgttaccgaggttatagtttagcatccggttctttttggagagatcaagcagcttcaggcggaggcgtccgtaaacctccgtcaagcgttcctgctcgcccaaatcgtcagcgatggtcaccggattacccctcgatgcatggctaacaaatccaaccgcctccccattgcgaatttagaccgcgttaagcgccgccttttcgcgctttcttttatccaaccagtctcgtaccgcctcttccacggcgtgagacatcttgatgtcatcttcaacggccgcgaccttaaccagctttacgacgtccttgttcatgatgatcagcacctgtcgtttgccctcaggcgcacgagcgcgggtctttgcgcgtctttttttgggcttggatagcatcataagtccaaggttgagagctgatcacgatgacacggggaacgcgaactcgcaatagtgctaccgtcgttatagtacctcggcgccgtcatgaacgtcgtcggcgtcaatagcagtcgggcttcgagcggcggcgcgatgtcgaacatcttcacctcgttgcggaggtgaaatacccagcggacccggtagatgtcgcccttctcggcggcattctcaggcagcttctcctgatactattgggcggcgctaatgggaggccaggccgctcccatgcctgagccgatcagcaataagaacgcgaccagattgaatatttaattgcgccgtggtcgcgcggtgtaactctgccgtctgaccgagagtctgattaatcgtagcaagcgcatttgcttgatcgcgcagtgccgcttccgctcgcagcgacgtttccatcgcatcactaagctcggtccttgctgccgccagctcagcgtcgagcctttcggcttcgctccaaagcggaccaaaattcttgagggcgtcttctgccgctaagttggcggttaccgcgtccgccagttgcgcttcagacgctacgcctatcctgccggatggcatcaacgcagcgctttcgccggcctacgatatcgtccccttcttctattacggcgacgactccatggcattgcaattcggcaagaccgtcgatcccgccgtcgtaaacctgcgccgcttcgagcggctggcgggcctcgtgggactcgacaatgaactggtcgtccgcgaggtgaagcagacggtgcgggaaatcttcgacgtctggccgggcctcctgcccgagcttccgacgcctccggatttcgccaagaagctgatcgaacgatgggatcgactgacgctcgtgaaggagaccaggccagctatggtgcaaggtcactcgatagacgaggacgaccagtccgctgctgcgaaaacgccccgctgacggggctttggcccatgatgaaagacgacctgccgccgctcaagaccgtcctgctcatcatagctcattcaaggggtgaaagcgcgccgcaacggatcaaaccgcgatccgtggtttgcacgtgcgctcacgattcaaacggtttgcatccgccgatacgcttacgcgagccagaattccttctgctacctggtaaccaagggagccttgcaattactgagaacgaaccgacgcgcgaagctttttgattgcatcgatcggatcaaatccgatggcctctgcaagatccagaaattcaatgacatcaatgcgccgctggccactttcgaccgtggccacaaaagattgataacgccgcaatcgttttgcgagctgggcttgcgtcaaacccgatttcttccgttgctcaataagcagcgcgatcagggccttttgccgaggagatcggagcgttcgtggcattttttctgccccagagaacaaggggcagacaaataatcggatttacagattatctaaaaagcagatattgtacgggttggaagtcctctcaggttccgtcccatagggatcgtttcagaagaggttttttaggcgggatgacaagcagttttctgttcaagaattgatgtcttcaattgctcggcgttaaaccttcgtttgtttcaaagtggcatctagtggctcgaacattctatcgggagagaaagccattgagcgaccaatccgatcttgaaaagaaaaccatcgaggcgctggggcaatatcgcaaagccctcgccacggttgaaaggcaggaacaaacggaagctaccgcgcagcgagcgctcacgcggatgctccccgatcttgaacgcgcaatcctcgaagactgttcaccatcggtcaaagacaatctggttcaaaccggcctggcagcggtctcactatcgaacgaagcgtgggacgccctgaacaaggccaccacgacattggaggtagcccgccaagccctggtcgccctggagcagcaacttgggtatattccaggcgtatcgaccgttgcggcaaattccagatccatccggcatagcccaaatagtggttgaccgatttcaggcccagacacgcggttggttacttgctgcgttcgtcgcctcgcgtatcaccccgctgttcgatattgacgccctgctccgtgccgcgacgccggctatcggcaagctccgaaagctccttcttcaacacatgccggcgggtttcgatcgcgggcatgtccttgatgaattgacggatctgtcgcgcgagcgcgtcatcgcgcgccgtcccagagcgctgcagctcagccgcgtagtcgagatatcgctgccggatcgcgtcctgacgtgaccggattcgggcgtcccaaggtcgttcggtcgtcttgccgcccctcacctcgcggagaacctcctcccgcgctagccgatcgacctcgggcgcaatctttcgcttgcgcaaggccagcaccgccccgcggtcggcttttcgaattcgtccccgggttcgtcgcggtgttgcctccgccgcgatcccacgaagccgaagctctccggcaaactgctcgcgccaggcctgaaggtctgccttacgtgggtttagacgccggccgtcatggcccaaagactgaacggtcagatggacgtgggggtgtttgtcgtcgaggtgctggacgaagacgtagtcgtgattgtacccgaaggtttcgatcgcaaacgcccgcgccgaatccttgaccgcaaccgcgtcagttcccgccggcatagacaggatgatgttgatcgaaagcgatccgtcgcggcggcgcttgtcatcgagaccagcatcgtcctcccagcgttgctgcaggtccttcaatccgactctccccgtcatcgccgcgccctgctctgtttcggcgtcaagttcgccgttccgggtaatgtaggcgaggtgcgatttgagatgcgccacgcccttggtgcggccggtgatcttgaccatcacctccggcactcggctcacgatgcgttcgagctttgcacgcatcgccggcgtgagacgccggggaacggcaggatcgggcgtgtcccattccgcgcgccggggacgccgattgggtgtttcccagacatatgagatcggcggcaattcgacgagcgggtcagcctgctgcggcgagcgacgccgggtcatcgccgcgtctcccaataatcggcgttgccagcgagtgcgccaagcaattgcgcgagtgccaagtcgatcgcggttctggcatcgcggattgcggagagatcaggctcaaccaccctgccctgcagcacgctggtattcgcggcgcgcgcgatctggttgatgttaccgccgatccggttgagctcgcggacgatggcgcgaagcgcggcaagttcttcgagagaatgctgcaccggcgatcccaatcgcgagcgtacgagggctacaatccagccggttcgcgtcataccgcgctggcgtgcggtgtccgcgagctgccgcatctcgctttcccgaaatcgtacggtgattttctccggcctgcccaccggtaacggcgcaatccgcgccggcgatgcattcagcacatcagcgatgaggcgacgcaacaaggcggacttgccgccttcggaagccgcaaccgccgacaagcgcgcggctacctcgtcgggaattcgaagcgagatcagagccatccactccaatcccaatcgcgatgtaatacatcgctggcgcgaagcctatcctgcactagaaaaagaaaaaacgtacccctcggtgttggtttaaaccaatacgctttgtgttcagggctcgccacggcgaagcgatgatcgactagccctgccctctctgccaaattctgcccgcggcgcccctttgacgaggtaaccatcgcgagcacggatccgtcggcagcaaaggaaacgaaggcactaactatcgtcggtgatgtagaccgcgactttccagcagcctgcggcctcactacagcgctatggggagcgcgttcggccttcggctgctgcgctaacgcgccatccttcggatgggaaagtcgctccgtcgccgcacgccggtagtctgtctctgcggctgcgaaggtgtcgaacgagttcatctcgacaggatctcctcgatcgtgagcgccgacgctggaacttcttctgcgtgctccgcaccatctaccaacaccacagcgtgacgggagccttgcgtcgcgagccgatcaacaacaagctgtccgatccggttctgataccgaaccctgattgccagtgatgctgccgacttcgattgtgaaacgaggcgagtttttggcagttgattatcgggtgctgcctctcggcctttggcaccgatgcctggcagaattgcttccggcaggagatcgcatctttcggatcgaggcggtccagcaggcgattggtcctgggcagtggcgcgatcggccgcggcgcgtacgtctcgggccagttgccgagcttgcgcgtcggtgaagctgtcctgcgtcacacatcgccgttcgatctcgtccggatgcgtgcgccaggcctggtagagttcataaagagcgcggatcgaacttccctcaagtctcgctcggaggaatcctggcatgccttgaaccgacgcgtagcgcgacacccagtctcttggcttgcctagcttgcgcgatatatccgcctgggtatcgccggcgcccaaccgatctgcgatgaacgccgcgatctcaggcgcgcgcaaatcatcgcgctggatgttctcgatcatctgcgcgtatcgatccggcaaacctacttcttgaacgaatgcgggcatttcacgcagccccgcgcgctgcgcagcacggtaccggcgcgcacccatgacgattacgtatcgtccaacctcattggaacggcgaagcatgatgggttgcagcacgccatgttcgccaatcgattgtgaaagctcctccagttcctgttcgctgaagttgcggcgtggctgatcggggtcttcgtcaatgcagtcgaccgcgactaagagcggtcgcccacttgctgcgttagggtttgcagcagcgtcgacgagttccttaaagctgagatcgagcgtcactcgtcgtctcctgatcaagccgatctgcgatcttggcgagaaccgcgcggatttctcgacccgcttcttgcgccgatcggcgtttcaagctccagaccggcacgcgctcagccacggcttcggcatagccgtcccttgcaacaatctggcctgggaacacgtacttgcccgcttcgcgcaataactgctccaaatgcgttcgctggcgaggcgacttggtattgaagttcgaaggcagcaggccgagaaatgttgtgtcctggcgaccgtatcgtcgttgaacaccgatcacggtctgcatcaggcctttgacgccttttacggaataatcttccaggtaaattggcgccagcacatgagaggcggcgaccaggcaggcgacgctgcgaaggccaagcgacggcggagtgtcgatcacgcagatatcgaaccgttcggcggcatcggcgagattctgctgcagcgtcatgacggcagcagcattgccgcgatcgatatccgtcagggagctgtcggccggcgccagcgtaatgccgttgttttcgccagcgacaagccgagtcgcgggcttgaagagatcggccgccgaggtcgaccctgtatgctgcttgagcgtatctgtcgcgttgccctgcgcatcaacatcgatcatcagaacccggcggccagcttccgccatgaaccaggccagatgcactgcaagcgtcgtcttgccgacgccgcccttttgattgttgatgacgatcgtgttcatcggatgaagcttgatgaaactatctgcgcccgtttcatcgattttcctcctccagcgcgccgcgcctaccggcacgaacttgatgaccggcctcctcatcccgggtgttggtttgaaccaacacccgcaatggaccagcgcgtgccccacactcccgaaaaccgggcataaaatctcctgccagaagagtcaggtaggccgagccaaaagaaagaaggcgccaagtcgaaaccagttcacatcacttgacaggcgacagtggtgttgacggaagacaaccgaaaccggaagcgcagcgcgccccctgccctgttggtttgaaccaacatgttctggggcttgcgccaggctgcgatgtccgtaacggccggagcgactaaaccgagccgaagccgcgaacgcgggcagagcgcgagcgccgcgaggcacccggccgaaagaattttggcagagaagggcgagcgcaaggaatcccagcggaggccccgcttgcgggtggatccggcaagcgaaaaatcttctccagcggtcgaccgagccgtcggcggccataggtatccagccatgcgaccggaagcgacagctcgagccgaggaagacctgtgatcatcgctttcacccggctcgcgtgagtcggcaacatcgcctggaatgcgccaaacaacctcgcttcgcccgctcaagccggaacctgccacagcccccatcatcacatcgctcaagcccgccgcttttcgtgaagccgagaattgatctgcgacatcaggatcggcccaagagaaaattccccgacctccgctttccgggtcagcccgcgcaagtagccgccagctgatctgatcgcggtgccacgctgcaggatgcatgcgacgacgaccgccgcttgcgtttcgcccaggacagtttgcgcctcctcccaggcgctcggactgatccccagcattgatctcacaacggccgcggtggccaggaaatcacgccagttcgaaatcccgcccttcgcataatcgacgatgtccgggcatgcactcaggaccattcccaacggatacgaaccttccgcgactcgcgatggttgaagttttagctcagctccccccgccctgcctttctggaggctaggttcaagatcaataggggcatctgtatttgaattctgtatgtggcgctcagattgggactcattggcgctcggattcttggatttaatatgcgtttccagaatattgagtacgtcgtcggcaagttgcgacagctcgtcagcgatcggctcgagctgctcccgcgtggccgtcctcggaatctgggctagcattgccctgaaggcggtgtggacttcctgccagtcgatcggcccctgccctcccctgcgcgtcgggacgccttcctcgatgccggtggcaatcatcttggcgatatcgcgccggcaaagcgtgatgcgttcacgcacgagcttgagcgcgcgcgcctctgcttcgatgtcggccgccaggtgctcgaactcttctgaacgcacgacgagcggcgacagatcgaagccaaaggcaagctcgatgtcgccggcgcggcctttccgcgcgtagcgcttgccgtttggactatcgcgccgaataatcaacccggcgtcgaccaggacggcgaggtgccggcgtaatgtcgaagcgggcatgccgtgcgcgcgcaacgttagcttgtcgttggacggaaagacgatcaggtcgtcctccccagtcagggccgtctccggatggaaggtcaaaagcgcgttcaacacggatagcgagcgctcggacacccccaggcgcggccgcgccgtacagatggcgtggaaaatattccatttatgcacgaccttttcgggcggtcgcgccgaggccccgatttggcttgccacatgggcaagcgtcagcgatcgccgcccaaagggcgtcgttggggagtgtgactgcatgtctttgcctcatgcgggcaaagaaaatctgctcgccaaaacggcgccgtcgctaaagacacttgactgcgattcgcgaaagtgattctctgtcagtcgccaaacatgacgagagaaggctttcggacggagacgtttcgggggccttttctttttccgctatgctcctacggttagaggacggaaacgcgggtacgcatcgcgccgcctgaccatgagaggtctggacggcgccatatccaaagcggcgagacgcgcgatgtcattcatcggtacgtccctcgcgaaaagcgcggtagagttctggcagccgcgaaatcacaaagtctccaaacgccggcgcggccttttcatcgagcgcgagcgtgacgcgatctgcgcgacgttcaatcttcacaattttcttgccgtcgtcatcggtccaagtcgtcggccgtggagctttgggcttgcgaggcgcgagcgcgacgaatgcgatcgcgaaccgttcatcggaagtagcacgcacgaagcgatcactagccacactgtcagccaatgccttttggtcgtggcgacccaccatccgctctgccagctccatccagcgccggcggccggtcttcggcgctggcccgatcgcatcgaccaagctccgtggcagggcccgcgcgacggtgatgaggcgcgagagttctgtcttgtcgacgctgagcgccgccatgatgatctcacgcttgaatccacgatcctcgagtgcggcagcgtaagttgcccgctcaatgaaggacagatcctcacgctcgccattctctttgccttgtgccaccaccaggtcttcgtcgctgaggtcacggactaccgcccgcgcgggatggccaagctcggcaagcgcacggacgcgacgatggccataggcgatctgaaaccgtcctggaccggtcggatgcggccggagaaggactggaaccaattgtccattggcgcggatggattcgacgagagcggggtgcttctcgtcgacgcccgtcaagcgatccggaacgatcgaggcgtcaatcaatcctgtatcgatttcaacgacggcttgaccggtggtgagttgttcggtcagggccttggcggcatcgcgctccgcggacagcatctcgagcgagcggctcatggcgccgactgcaccgcgcgatcccagtgttggttgggaaggtctccgattgtcgctggactcacctgacggctgttcgttgaccgcggtcaacttgtcgtccaagaggtcagcaagcaggtttttgcgacccattaggtcctcccccatgcggcttggatgaggctttgaatttcgccattgacgctgtccagcgattccattgcgcggtcgtaggtagcgcgtgtgaactgatcgcggctgacctcatagagtgtttgcttcgtgatgccggcgtcggagatcgccgtgctcttgagcatcatattggtgaccatgcgatcgccgaacagcgagcgcatgaagccgaccatttgggcctgcggtccatcaccgggctcgtagcgcgtgaccagatatcgcatccaatcgtaattcatgttgccgcctgccttggcgacgacggcgaggaggtcggatgtcatgatgaggaattggcacatcgacatgacgtcgagcatttgcggatgcaccgggatcaggatcgcggttgccgcgcagagagcggagagcgtgagaaatccaagttggggcggacagtcgatcacgacgacgtcgtaacggtcctggacagtggcgagggcacgggcaacgcgggcgaagaacagcggatcacccgactggcgcatagctaacgctttcggggtctcgtgttcgaattccatcagttcgatattgccggggacgatgtcgagccccgaaaagtaagtctgtcgaatgatctcgtccagctcacgacgctcgctgtcatagcggatggcgccgtagagggttccgttttcctcgacgtcaaactctggctgatagccgtgcagcgccgagagcgaggcctgtggatcgagatcgaccgcaagcacccgatagccctgcagcgtgagatgttgagcgagatgcgcggcggtggtggtcttgcctgatccacccttgaaattaacgacgccgatgacttgcaactgttcgcccgcgacgcgatgcggtcggtatcgtcgcacgcccttgccggattcgtcgagataagcccgaaggctctgaatgtcttcgaatgtgtacgaccgtcgacccgatggactggtatcaggttgggggccccttccctccagcgacaattggcggagatagccgtcattgatgccgacgagtttagcgacttcgccggatgtgaaccggcgtaggttcttacgggcttttggcgggaacagcttcatgcgatgggcatgaagcttcgcggagagttcgcgcgcatcggccgcgatcgtttcgtggatcgttgggggcgcggccgaagggattggcgccatcgcgtgttggtcgtttagggccacggctttctcgcgtagttacgaatttcggatgcagggcgtgcgcaaagcgtggctagtacgcccgattctgggcgatcgcgcaacaattaaagggttaacgagtccttaacggtccactgggccctctcggaaaagttgaccgcggtcaactccacggagatcccaccgagcgccaccacctgcttgttcatccgctgacatagattccagcccacgcgcgaaggctgatcacccccaccaggagaaagttgaccgcggtcaactctcctcgaatggcccgaatcgcgtccctaatcgacgtccagtctacccctttttaccccgccgctagactagccgaatttacgttcggcctcgggccgtggctgttcagacgccgagccgtgcagcttgaccgagtcgtcgatctgcttcgttgtaataactggcggcctgttgcacggatcgatgctgggattgctgcatagcctccggcaaggaaactccgcgttgcgccgcctccgtcaggtacccggatctcaagccgtgggcggaaaattcccgcgcatcgaggcccgccatggcgcagcgccgcttcacaatcaggttgatcgactgcggcgtcagcgccctctcctccaccgcctcccagcgatcgatggcgcggaagatcggcccccggctgatgtccgcccgctccagccattcgcgcagcgcctcgaccggcggcccgaccagcagcacccttcccgcctcatccgcttggccggtcttggtgcggccgagctgaatggccacgcacggcaacgtctcggattttgggtcctgcggattaaacgggacctgcggttcgtggctgagctgctcgacccgcagccgcgccacctcgctgcgccggcgtccgccggaggcgaaggcgagcagcaggatggcaagatcgcgggcatcggccagccggtcggaccggcaggtagcgagcagacggtccaggacgtcgcgggtgaacgcccgcttgctcttgcgctgccgcgggcgcgtgctggcgcgaaccgcgagccgtagcgcggcgcgcagactgggcgaggcaaacggaccctcctgccctttccagcgatgcaaggtgccccagcttgcgaggcgccgcttcaccgtcgacggcgcatgcgggccggcgctccgcagcatcgcggcattccgcagcagcgccgccacatcggacggcatgccgtgctggggatcggtctcgcgcttcgccgggtcccacagatggtgcgcgacgaatttcaacgcgaggctttccgaggccggccagggcaacgccgcgccggtcgcggcctgggcccaggcttcgaggtaggcaaggtccgacgccagcgcccgcagcgaattctcgcccatgccttcctgagcgagatgtttgagcgtcgcgacgtcgtcgtcggtcagcagctcggcgagccggtcgcgccgctccatcggcaggatcgccgagagcgtatcgagctgtagcgcgcgccgggtttcgggatcggagaccaaggctcgggaggtgatgtcgtccatcggctgcgctccgtcaaaagccgtaggttcgatcggcccagcgcagcagcacgcgggcgtcggggtcgggcaggcgcacgcgttgcgccttcaggccttgtgcgatcgccaggccgacatcggggtcgacccaatggccgtgggtcatcaggaagaaccagccgaagggcaggccgacctcgcggtccacggcctcgatccggtccatcagaagatggaccgaagcctccggcgtcatgagcagtcgctctttcgggagcttcagcggccgggggatgaagccgacttcgcgttcgcctttgtgggtgtagtcgcgggcatcgagggcccaatgcgcgaagacgcgctgcggcctggcgctcgattcctcccagtcctgaaagaaccgcagctcgcggggcacaaagtcgaaatagtccgtgaccgcctccaggaagggcgtctcacgtgttccgcccggcccggtctcgcgaatgattcgccgctccaactcgggccgtttggcctcccgcttatcgcgctcgatgcggccgcagcgatccagaaaactgcggacgtggaccaccgcgccgccggcgcggccgagcaggcgatagaccggaccggcgaggcgatccgaatcagggagctgatcggtgcgaggccagctcggatcgagcagttcttcttcgccaaacgggcggtggttgggattgacgatcgggccggcgcgccattcgatttcgcgaccgagcgcgatctgaacgtaatcggccacacccggcccggtcggcgccgacacgaacgcgctcgtcccccgccactccgtgatctgcagaccggtctccttcagccgcttccagaccgccgtcacatcgccgttttccctggcgagttcggccgtcatccatggccgcaattcgccaagccgcgtgccgtcgggacgaagcaccgatcgggtatcgcgccagtaatcgtcatcgatcggcgcgatgccgaacgcaaagcccggaaacgccgcggtgagggccgggaccaggtccgtatcggccgaggccggatcgagcgcggcgaggacggtttcgagcgacgcggcatcggggaggcgggcaggggcggtcatcggagcgcgccttcagtggtgagcaggccgttcacagttcgatgtcctgcggtcgatcacggattcgttcgatatccatcgggtcctgccgtaaaggcgaagccagcaggaaatctgccagcgtgcctttgcgggctgttctgcgcgcccattcctcggctgagaggagcaccgcgctcggttggccgtgtcgggtgatgacctgcgggtgggcctgcgcccggtcgacaacctctgaaaaccgtgcctgcgcacctgccaaggtccagatgttcgaagagggctctgagcgtctattgtccgtcatcggggcatcctcctatgaataccggctgtctcctggcccattcatacaagcgccgaggaccacttgcgggattaccgggatttccgtatattacggaacgaaggagatttgaaccatgagttcgaccgtcaccgccgccgaagtctcgaagaacttcggcgcctaccaggatgccgccgtgcgcgagccggtggtcatcaccaagaacggccggccccgcacggtgctgatggcctacgaggatttcgttcggctgtcgaagcgggaccgacgcgtccagcgcacgattgatctgagcgaggcggagatcgccgcggtcgaggctgccgagatgacacctgatcccggccatctcagcagcgcacccgacgcgaaacatgctgccgactgagatcaagctcggctggatctttcgctattcctatctgtgggattggcagcaccgcgaaggccgcgaggagggcgacaaggaccgcccgtgcctggtgctggcgattgtcacaacaacggaggacggcacgccggtggtgcgcgtcctgccgatcacccatacgccgccggccaatccggccgacgcgatcgaaattccggccgcggtcaagaaccgcctgcggctcgaccatgagcgctcctggatcgtgctgaccgaaagcaaccgctttacctggccgggccccgacttgcgcaatatcgacactgagagcggctactacggcgcgctgacgcccggcctgttcgccgaggtcaaacgccgcttcgtggcgatcgcccgcggtgaggttgcgaccagcgcgccgcaccggagcgtgccgcgcagcgagtgacggtcgtcggcggcggcgaaaagcgtccggaagagggcagggggctggcaacggctgcgtcctcgcgtcgagcggagcgccggcgggcgtgatttgccgggctcgtagccgccagaatcgctgatttgcgccgtgacgtccaacgctatcgataagggaaggttatcgatagtgatacacgtcgtgtgcccggcctcgctatgacggaagccaacaccgtgatagcttccgcttcagtgattcccgttaaggttatcaagaccttgcatgtcagctaccagatccccgatccgctgccctgggcccagctcgccggcccactcgccgctgccgaagatgcgctcgcccgcctcgacgagcggttggcaaaaagtccgatcagcgacggttttgtcgcgcgcacccattttaccgacgcctgcgccagtctgtggctggaaggcgaactcgtccatctcgaagatctggttctccacgacgccggcatggatatccgcagccccacccacgagctgacccgggcccacgccgtgctgcggaccaggcgtcgtatcgccgcggccaagccggactgggcgctgtcggtcagcggtcttgcaagcttgcgcggacggggagggcagggcgaccgggaagcgggaagcgacgaccggaaggaaggggcgcacgatggcggcggcgcgaacgatgccgaggccacgctggacggcgagaatcttgatcagccgctcgtcatgatcgaaaccgacccgcggctcgctgccgccttcgccgcggtcgacgccgcgatcgcgaaatccgaccgaacgctcgccggcgagaccactcgccggcccgagcgtgatccgctggtctacgatctcgattgggatgaggacgccaggatcgaggactggcagcgtatcgtcgatcggactcgcacgttgccgccggcgctggcggcggcgatcacagccgatgcctgggaccgggtcgaaccgctgcagcacatgccgtggcttggccgactgctcgccagcgccgtgctgcgtgcacgcggcaaaacccgttggcatctctcctgcctccatgccgggctgaaaaccatcccgcgcgaacgccgtcgatcgtccgatccggcgtcgcggctcctgactcaattcgaggcgatgaccgcggccgccgacgccggcctcaaggatcatgatcgctggcttaaccagcgcaccctgctcacgcgcaagctcgtcggtcgccgcaccacctcccggctgccggcgctgctcgactacatgctggcccggcccattgcctccgccggcatgatcgcggcggagctgaagatcacgccgcgcgccgcccaggacctggtggccgaactcggcttgcgcgaggcgacggggcggggacgctatcgggcatggggaattctctgaaaagccgcgccctggttggaccaaccttgtccgaaatttgtataggtatttcggacatatcacttgcaatctgtccgaaacaagtatacaagtttcggacatgaatagcgccccactcgatctgaagacagccatgctcgagcgcatccgtgcggacgcaccgcgtaaggtctggacgcccagtgatttcgtggatctcgccacgcgggacgccatcgataaggcattgcagcggctgacgaaggccgaaaccctcaggcgaatcgatcgggggctctacgatcagcctggcttcaacaagcttacccaaaaacccaacccgcccgatccgcgctcggtcatcgacgccgttggacgacgcgaccaaacgcggatgcttgtcgacggcatgaccgcggccaacgatctgggcctgactgacgccgtcccggccaaaatcgtggtgcataccgacgcccgtcgccgcgcgatccggctgggtaacgtaacgatcagttttcgtccgaccgcggccagcaagctgttctgggccggacgaccggcgatgcgcctcgtccaggcgcttcactggctgcgcgatctcttggttcgtgaaggcgagagcgatcaggttaaacgcaagctcgccaagcttttcgaggatcccacaacggggccgtcgcttagagccgatctcactgccggtatgtcagctcttccgacatggatgcgggtgtttcttaagccgctcatcgaagcggatgctgccgttggtcgtcggcacatcgacgatgatcgtgatgatgctgatcatgttggcgcagatcatgatcgacaaagaaggagtgaaaacgatcagagtcacgctgtcgtcgtacctccgaagccgaaaccgctctccacccagaagaaaccaatcgccaatcgcggcgcaacccggagggcgaaggcatgaacccggctttcgatgaggttctcgcggccgggtcggacacgatgttgagcgccttcgatacgaccgcgctacgccttggcacggcatctcagaatatcgagaaggacttctgggtctgctggacgctggatgccttgttcaatggcctgaaagagggaggaccccgcctcctcttcaagggcggaacctccctgtccaagggattcggtctgatcaaccgcttctccgaagacatcgatgtcacggtgtttcgggacgacatcggcgagccggctacgattgaggagcttaacgcgctgagcgggaacaagcgccgcgcgcgcctcgatgcgatcaaggacgcctgccaagcctatatcaacggcccgctgcgcgctgagttgaccctgatcctacaagaccggctccgggccgccggccacgatgccggcgcggcgcgggtggaagccgacgacgccgatcccgacggacagaccctgttgatctggtatcccgcagcgacgccgcgatcggattacgtgcgggcggcgatcaagatcgagtcgggcgccaaatccgcgctcgacccgaacagcgaagtgccgatcaaaccctatgtcgacgatgatttgccggcgctcgacttgaccgtgccggccgtgcgcacggtcgatcccgaacgcaccttctgggacaaggtcgtcatcctccacgggctgcggcgctggttcgacaagcgcggcgagctgcgcgggggcggccaacgcgtgtcccgtcattactatgacttgcacctgctcgccggggacccgatcggcgaagccgccatcgctgagacggcgctcggcgtggactgcgtcgcacatgcccggatgttcttcaatcgaccggacttcgatctcgcgagtgctgcgcccggctcgttcacgctcgccccgcatgatgcgatgatcgagcagttgcgcgtcgactacagggccatgcaaggcatgatcttcggtgacccgccggatttcgaggccgtgctcgacagcatcagctcgctcgagacgcgtctaaacgagaacggcgcgagcgaaagcggggcggcgcgatgaagcagttggagggagccagccttcgctgcgtccatctcggctcacgcagaaacggccccgcctttcggcggggccgttgccgtggaggccccttagtcccggttcggtcgggaccagatgagctggaggccctcctggcc

SEQ ID NO: 26 - DNA, 119738 bp, Bradyrhizobium enterica
gccagcacatggcggccttcggccgccattaccgtaccatcgctccagctttcgattatccgcgtcgtcgtcaccttggcattgccgagaaagcggttgaagcgcacctcccgggcacgcatgcctcctgccagccgtcgcaggcagacatccttgcccgcgaccatgcattcgacgagcgccgcccccctttatcgaggcggagatccccgaaccgacctaatgaccagtcaatttgcgccagcatgtcgacacctccgccaaagccgaagtgccgcaatatgaatcacacgaaataccgattcgggaatccccacccaactagatgtgtgcatgccctagcgcgaaggcggggaccataatcacaaatggtcgctgttcggccgcgctgcggctccagcctgtgccgcaatcagcatcggtggttatgggtcccggccttcgccgggacgacaacgcggttaggccggcgggttcaccgcggagtcaggtcgcccgagctgctgctcgcgcacgaagatgtagaggccggccgcgatgatgatggcggcgccgacgatcgtggcccaggacggcacgtcgccaaacaccacgaagccgaagatcaccgcccagacgatcatcgaatattggtacggcaccaccacgctggccggcgcgagcttcagcgacctgttcacacagagcagcgccgcgaccgagatgatgccggcggcgaagaacagcacgaggctgccggccgatggcgtcacccagccgaacgacgacagcacgaggccgaggatgaaggtgccgccgaattgcgacgtcgccagcacgatgtcgggcgttgcgcgcagcgagcgtgtgatcagcatcagcacggcaaacgacaggctgccgccgagcgcgatcatcgccggccagctgatggtctgcgcggatggcctgagcgcgatcagcaccccgcagaagccgaccaggatcgcggtccagcgccgccagccgacatgctcgccgagcaagaggcccgacatcgcggtgacgaagatcggtccggccagatagtaggtgatgacgtcggcaagcggcagatagaccgtcgccaggaagaacgccgcgacctccacggtcgatagcgtgacgcgcagcaattgcagccacggccgctccagatgccggaaatccgcgcgccgcttccacaccatcggcagcagcaccagcagcgccgcgcaggcgcgcagccacagcaattgcccgaccgagtaggtggcgacgatgaatttgcccatcgcgtcgccgaccgagaacatgaagatcgacagcagcatcaagccgatgccggcgagccgcgccgatcgatcgtcgtaggaggacagttttgcgaacaggctcattgttgtcttgttatcgccgccacttgagtcggacaggtccgaacgccggttttagcgaggtggccgtgcaggacaaccccggcgcgggcatatcgaaccaattgtcgcagtgccgcagctgcgctacggctgggccagcacgtcaagaaacagagcaggaaacgccgcatgagcgacttcgaccccacccagcatcgcatggtccccgcgcagcgctggttcgaggatttcgtgctcggcgagcgcttcgtgattccgagccggacccagacctcggccgtgttcgcggcgttccagaccgcaagcggcgatacccatccgatccattacgacgtcgagtattgccgcagccgcggcatgcctgatttgctcgcgcacggcttccagaccctggtgcacaccgcgcccggcgcagggctgtttccctatgtcgtggaggaatcgctgatcggcttcctggaacagtcgagcaagttcctcaagccggtctatgccggcgacaccatctacccggcgctggaggtgatcgagctgtcaccgggcaagaccaccggcgtcgtgacgctgcgctcgaccgtgtacaaccagcgccgcgagttggtgctggaaggaatgcagaaattcttggtgcggcggcggccgagctagcagcatggtgagattaggtcgagctggatcggcgtcaaaagttcacctctcccttgggagaggtcgatttgcgcagcaaatcgggtgaggggttgcggtctatcgagagagcaagaaccctcacccggcgcttcgcgccgacctctccccgatggggagaggtcgaccgagaccgcgccagccgattcaactaaaacccatcccgctttcgccggggccgcaaaaaggctcgaaaattaaggcttttcgccaaagtcagggcctttccgggttgccgcagcggccaccctgccctaactagagcacaccggtgctgatgaaatcaggaccgctgtgctctcgattctcgttttgacgcgttttcttcacgcgaaccggcgaccacttcgcttgaaaacgctatagttgaaatcatgaaattcctcgatgaagccaaggtctatattcgctcgggcgacggcggcaatggctgcgtcgcgttccggcgcgagaagttcatcgagtttggcggcccctccggcggcaatggcggccgcggcggcgacgtcatcatcgagtccgtcgacgggctgaacacgctgatcgactaccgttatcagcaacacttcaaggcccagaagggcaccaatggcatgggcaaggaccgccatggcgccaacggcaaatcgatcgtgctgaaagtgccggtcggcacccaggtgttcgacgaggaccgcgagaccctgctgcacgacttcaccgagctcggcgaaaaattcgtgctggcgaccggcggcaatggcggcttcggcaacgcgcatttcaaatcctccaccaaccgcgcgccgcgcaacgccaatcccggcgcgccgggcgaagagcgctggatctggctgcggctgaagctgattgcggatgccggcctggtcggcctgcccaacgcgggcaaatcgaccttcctctccgtggtcagcgcggcgcggccgaagatcgccgactatcccttcacgacgctgcatccgcagctcggcgtggtgaattacggcggccgtgaattcgtgctcgccgacattcccggcctgatcgagggcgcgcatgaaggcgccggcctcggcgatcgttttctgggccatgtcgagcgctgccgcgtgctgctgcatctgatcgatgcgacctgcgaacatgccggcaaggcctacaagaccgtgcgcaccgagctcgaagcctatgcgggccagctcgccgacaagatcgagatcgtcgcgctcaacaagatcgacgcggtcgcgcccgacgagctgaagaagcagaaggaccgcctcaagcgggccgcgaagaagacgccgctgctgctgtcaggcgcaaccggtgaaggcgtgcaggacgcgctgcgtgcgctggtcgaggtgatcggcgaggcgccggtgtccaacaaggccaagggcggccaggcggagccgtgggcgacgccggtgccgcagggttgacggcaaccagacctcccatgccacctcgtggcaccttttgcttccaccttcctgccagaccgaacccatgaaacgccccgcgctcaagaactttcgccgcatcgtcgtcaaggtcggctcgtcgctgctggtcgattcgcaggccggcgaggtgcacgcctcctggctcgcggcgctggtcgaggacatcgcaaagctgcacaagcgcggctgcgaggtcatggtggtgtcgtcgggctcgatcgcgctcggccgcagccgcctgaagctgccgcgcggcccgctgaagctcgaggagagccaggctgccgcagccgtcggccagatcgcgctggcgcggatctggtcggaggtgctcggccatcacggcatcggggccggacagatcctggtgacgctgcaggacaccgaggagcgccgccgctacctcaatgcgcgttcgacgatcgccaagctcttggaatggggcgcggtgcccgtgatcaacgagaacgacaccgtcgccaccacagagatccgctacggcgacaatgatcgtctcgccgcccgcgtcgccaccatggcgagcgcggatctcttgatcctgctgtccgacatcgacggtctctacaccgcaccgcccgcggtcgatcccgatgcgaagctgattccggtggtcgagagcatcacctcggagatcgagggcatggccggctcggccggctccgagctgtcgcgcggcggcatgaccaccaagatcgaggcagccaagatcgcgaccaccgccggcacccacatgctgatcgcctcgggcaagatcgagcaccccctgcaggcgatcgctgacggcggccgctgcacctggttcctgaccccggccaatcccgtcaccgcgcgcaagcgctggatcgcgggctcgctggagccgaagggcacgctgaccatcgatgccggcgcagtggccgcgctgcgcgccggcaagagcctgctgccggccggcgtcgtcagggtcgacggccagttcgcgcgcggcgatgccgtggtggtgcgcggccccgacacccatgagatcggccgcggcctcgtcgcctacgacgccgagaacgccgagaagatcaagggccgctcctcgcctgacgtgatggcgattctgggcatcagcggccggtccgagatgatccaccgcgacgacctcgtgatcggcccggcaggcgcgatcccggccaagtagggccaaatagagcactgagtaggccattggccgagcgggcggcctgccgcccacctgccatgccggttccgcgcctcgccactccctaattgccatgctagaacatggccttattccaaagctgggacttccatgagcgcccccctgaaggcgatcgacggcaacgccgatctcaccgccctgatgaccgacctcgccgccaaggcgcgcgccgccgcgcgcgtgctggcgctggcgccgccggagcagaagaaccgggcgctcgccgcgatcgaacgcgcgatccgcgccaatgcgccggccattctcgccgccaatgccgaggatgtcgccgaggcgcgcgcgggcggcatgaccgcggccttcgtcgaccgcctgacgctgacgcaggcgcgcgtcgaggccatggccgatggcgtcgcaaccgtgcgcgagatcatcgatccggtcggcgccgtcaccgaaagctggcagcggccgaacggcatgaccatcgagcgcgtccgcgtgccgctcggcgtcatcggcgtgatcttcgagagccgtcccaacgtcgccgccgacgccggcgtgctgtgcctgaagtccggcaacgccgtgatcctgcgcggcggctccgacagcttccgctcctgccgcgcgatccatcaatgcctggtgcagggcctgcgtgaagccggcctgcccgaggccgcgatcacgctggtgccgacccgtgaccgcacagccgtcggcctgatgctgaccggattgaacggcggcatcgacgtgatcgtgccgcgcggcggcaagagcctggtcgcgcgcgtcgaggcggaagcgcgcgttccggtgttcgcgcatctcgaaggcgtcaaccacatctacgtcgatgccagcgccaggctcgatatggccaagtcggtcgtgctgaacgccaagatgcggcgtcccggggtctgcggcgcggtcgagaccctgctgatcgatcgcaacgcagccgcgacgaaactcaaaccgctggtcgagctgctgatcgacgccggttgcgaggtgcgcggcgacgacatcgtgcagggcgtcgatgccagggtgaagcccgcatccgacgaggactggaccaccgaatacgaggacgcgatcatctcggcgaagatcgtcgacagcctcgacgccgcgattgcgcatatccagaatcacggctcgcatcacaccgatgcgatcgtgaccgaggatgccgcagccgcgcagcgattcctcaacgaggtcgattcggcgatcgtgctgcacaacgcctcgacccagttcgccgatggcggcgagttcggcttcggcgcggagatcggcattgccaccggcaaattccacgcccgcgggcccgtcggcgccgagcagctgacgagcttcaagtaccgtgtccacggctccgggcagacacggccgtgatcattgtcgcacgcgcacggtagacccttgcagcaagcttccaccgtgccgttgtccgcggcccaggcgcttccgttctacaccaacggcatgcgcatcgggctgctcggcggctcgttcaatccgccgcacgccgcgcaccgcgccatcagcctgttcgcgctgaagcgcctgcagctcgaccgcgtgtggtggctgctgacgccgggcaatccgctcaagaaccatgacggcctgcatgcgctcaacgagcgcgccgcggcggcgcgccgcgttgccgacgatccgcgcatcgacatctcttgtctcgaagctgtcattggcgtcagctacactgtcgacacgatcatccacttgcgccgtcgtgtctccggcgtgcactttgtctggatcatgggcgctgacaatctcgcgcaatttcatcgctggaaagattggcggcgcatcgcgtccgatgtgccgattgccgtgatcgaccgaccaccccagagcttccgcgcccttgccgcaccggcggcgcaggcgctctcgcgctatcgcatgcccgaaaatcaggcgacacggctggccgatcagcaggcgccggcctgggtgttcctgacaggaatgaaatccaatctgtcttcgaccggactgcggaacccggacgggagctggagaacggcgtgaggcgtaaaagggttactggaatattgaaaccattaaccccacatgcctaatatggtgcgtggggccgaggattcggcagcccgcgatacagtgaaaggaatggtccctggccacatctgtattgtcaaagtctgttttacccaaggttccaaagactgcgcgtaaaacatcgacgaaaaccgcggccttgcaggcgcaaccggacgctgccgaactgaacgctgccaaaccggatgccgacaagacgctgagcctggtcctctctcgcctcgatgacatgaaggcggaagagacgatcaccatcgaccttcgcggcaaatccgcatactccgactacatgatcatcaccaccggccgggccaaccggcacgttggtgcgatcgcggagaatgtgacgaagagcctcaaggaaaacggggtcaagaacatccatgtcgagggcttgcccaattgcgactgggtgctgatcgattccggcgatgtgatcgttcacgtgttcaggcctgaggtgcgtgagttctacaatctcgagcggttgtggactcagaacccggcagtcgcggcggtctaacgggtatcgaagccgatgcgaatcggctgcggcgcagctagtctgcgctgatgcgtctcgtcgtgatctgcatcggccgcctgaaacagggccctgaacgggagctcgccgagcgttaccgcgagcgcttcgaggatatcggccgcaagctcggctttcgcggcctcgaggttcatgaaattccggagagccgcgcgcgcgacaccgccgcgcgtatcgcggaagaagccgcggcgatctccgcattgctgccggaaaagcatatgctggtcgcgctcgacgaacgcggcaagagcatcgacagcgcaagctttgcgcagcagctcggccgctggcgcgacgagggggctgcacatactgccttcgtgatcggcggcgccgacggactttcgcctgaattgcagcgcaaggcttcgttgcgtattgcattcggctccgcgacctggccgcatcaaatggtccgcgtcatgcttctggaacagatttatcgggccgcgaccattttggccggccatccctatcaccgcgcgtgacacggtgacggacagacaaaagcgctgaacagctcggatgcagcacaagcgagaccagctcttcgatcttcgcgccacgcgacgacgctggctgtccttcctgctgccgccgtcgattgcgctcctcgtcgcttcggcacatgcgcaggccccatcaccgacgccgcagccggcgcaacaagccgccacgaccgcaacatcccccgacgacgccatcaagcagcgtgagcaggagctcgaggccgcgcgcgagcagcagcgcaaggcgaccgagctgcaggacaagctgaaggccgacatcgccgcgatcggccaggaccgcagcaagctcaaccagcagctgatcgatattgccggccaggtgcgcagcgtcgagacccgtatcgcggatgccgaggcacgcctgcagccgctcgacggccgcgagcgcgagatccgcacctcgctcgattcacgtcgctctgacgtgatcgaggtgctggcggcgttgcagcgcgccggacgacgcaccccgccggcgctgctggtgcggcccgaggacgcgctgcaatcgctgcgcaccgcgatgctgctcggcgccgtggtgccggaattgcgcgtccgcgccgagaagcttgccgcggatctcggcgaactggtcgcgctgcgcaagaccatctcgaccgagcgcgacgcactggcggccgaccgcgacaagctgcgggaagaccagacccgcctggcggcgctggtcgacgagcggcagcggcagcagagcgcggccgaaaaggacatggagaccgaaggcgcgcgcgccattgcgctgtccaagcaggccgacaatctgcagggcctgatcgcgaagatggagcaggacctcaagagcgcggccaaggctgccgccaccgccagcctccagggagccccggcgaccgttaacggtaagccgaatttgggagcgttgaaggatccggcccgcatgagcccggcggtcgccttcgcctcggccaaaggcctgttctcctatcccgtgaatggcaccaagattcgcgaatttggcggttccgacggcgcggggggcgtacaaaaaggcatttctttggcagccaaaccgggcgcgcaggtcacaaccccgtgtgacggctgggttgtttacgccggtcctttccgcagctatggacaactcttgatcctcaatgccgggggcgggtatcatgtcctgatcgccgggatggagcgtatttcggtaaacatcggccagtttgtactcacgggggagccggttgcgacgatgggatcgacatcccaggttgcatccattctcgcgaccaatgcgagccagccagtgctctatgtcgagttccggaaagacggcactccaatcgatccaggtccatggtgggccgcaaatgaaggcgaaaaggttcgcggatgatgcgcaagacttcggtaattctccttagcgccgccaccggcgcggccctgacgcttttcgtcacgcagccccgcgccgtgctgatgggatcgagcgcgcgcgccgcgacgtcggacacctaccgccagctcaatctgttcggcgacgtgttcgagcgtgtgcgcagcgactatgtcgagaagcccgacgactccaagctggtcgaatccgcgatctcgggcatgctgtccggcctcgatccgcattcgagctacatggacgccaagagcttccgcgacatgcaggtgcagacccgcggcgagttcggcggcctcggcatcgaagtcacgatggaggacggcctgatcaaggtggtctcgccgatcgacgacaccccggcctcgaaggccggcatcatggccaacgacatcatcaccacactcgacgacgaggcggtgcagggcctgacgctgaaccaggccgtcgagaagatgcgcggtccggtcaacaccaagatcaagctcaagatcatccgcaagggccaggacaatccgatcgacgtcacgctggtgcgcgacaacatccgcgtccgctcggtgcgcgcacgcgtcgaggccgacgacatcgcctatatccgcatcaccaccttcaacgagcagaccaccgaaggcctgaagaaggaggtcgccaatctgcagggccagatcggcgacaagctgaagggctacatcatcgacctgcgcaacaaccccggcggcctgctggaagaagcggtgaccgtgtccgacgccttcctcgagcgcggtgagatcgtctcgacccgcggccgcaatgccgaggaaacccagcgccgcacggcgcatcccggcgacctgaccaagggcaagccggtcatcgtgctgatcaacggcggctcggcatcggcctccgaaatcgtcgccggtgcattgcaggaccacaagcgtgcgacgctggtcggcacccgctcgttcggcaagggctcggtgcagaccatcatcccgctcggctcgggcaacggcgcgctgcgcctcaccaccgcgcgctactacacgccgtcgggcaagtcgatccaggccaagggcatcgtgcccgacatcgaggtgctgcaggacgtgccggaagagctgaaggcgcgcaccgacaccaagggcgaggcttcgctgcgcggccatctgaagaacgacggcgacgagaagaccggctcgcagtcctacgtcccgccggacgccaaggacgacaaggcgctgaagatggccgacgacctgctgcacggcatcaagtcgaccgcgaacaccacgccggcgccggccgccccgtccggtgacaaggcgcccggcgacaaggccgccgccgacaagccggccaacaagtccgcgaactgatccgatccaatcgaccaggcgaacagggcggccctcgggccgccctttctgctttcggcatccaccactgtccgtgcattgccggggcggccggcgcgcgggaaagcaccgcatcgtgctatcgtttgcgctgttgattcggggagggtcatggcagaggcggccgacgaactgagcacgccgcttgggcagcagaccgtgggcaggacgcgccgtttccgcctgccattcacggcgatgcaggcgctcgccgtgctgctggggctcgtgctggtcggcttcgtcggcgttgcgctgttcaacgacaacccgctcggcggcgagccgatggcccgcatcactctgcgcaatcccccacaagccgctcctgacgacaagcaggccccggcgggccaggcgactgagccggcggtcaaatccgtcgcgaagacgccggctgccgccagcgacgccaaaaccgtcaccatcatcgacggctccagcggcaagcgccaggatgtcgtgatcggcgccggcgatccggccgagaaggctgacggcgacgcaccgccgccgctcgcgatgtccggtatcgatccgcgtctgctggaaaagtcgcgctacggcatgatcccggccgtcgccgacggcctgaaaccgttcacggtctatgcggccgaagccgaccgcgccaaggcggcccggatgccggtggttgccgtcgtggtcgccggcctcggggtcggcgccgccaagaccactgacgccatcatgaagctgccgccggccgtgacgctggccttcacgccctatggcgccgaccccggcaagctcgcggaacgcgcccgggcgcaacgccatgagatcctgctgcagatcccgatggagccgttcgactatcccgacaacgatccggggccgcaaaccctgctgaccacgctcagcggcgaacagaacctcgaccggctctattggcacctcagccgcctgcagggctatgccgggatcgccaatttcatgggggcccggttcgtcgcgtccgatcccgtgatgcagccgatcgtgcgtgaagccgccaagcgcggcctcagctatttcgacgacggttccaccccgcgcagcgtcgcgcagaccctctccgccggccagtcgctgccgttcgcgaaggccgatttcgccatcgacgcggttccgacctcggccgagatcgaccgcgccctggtcaagctggaaaccatcgccaaggaacgcggcacggccgtgggcgtcgcctcggcgctgccggtctcgatcgagcggctcggcgcctggctcaagacactggactccaagggcatcatgcttgtgccattgacaacggcgatgctgaaatcaaaatcgggctaaagatcaatctgttggtgcagcatgacctagccggggggccgggtctgatggcatcgggaaatgcgaggtagcggcagcatggcacgttatgaggacctgccctatcgaacctgtgtcggcatcatgttgctcaatacggccggactggtcttcatcggacgccgcgccggcggcatcgaacatgttgacgacgcgcatgtctggcagatgccgcaaggcggcgtcgatcccggcgaggatacgtttcaggcggcgcgacgcgaactctatgaagagaccagcatcaagtcggtggagaagctcggcgaggtctcggactggctgatctatgacatcccgcgcaccgtcgcgggccgcgcctggaagggccgctaccgcggccagcggcagaagtggttcgcattgcgcttcaccggcaacgagagcgagatcaacgtcgccaaccccggcggcggccacaaggccgagttcatcacctggcgctgggagccgatgaagaatctgccggagctgattgtgccgttcaagcggccggtctacgagcgcgtcgtgaaggaattcgccgctctggctgccaaatagacccacgacgtaccaaccgagatgtcatcagagaaaccctatcggcccaatgtgggcatcgcgctgttcaacgcggctggacgcgtgctgatcggccaccggatcaaggacgacggtccggagatcgtgttgcccggcctcgaatggcagatgccgcaaggcggcatcgacgacggcgaagatccacgccaggccgtgatgcgcgaattgtgggaagagaccggcgcggtcaacgccgactatctcggcgagaccgactggatgacctacgaattcccggcctatgacgggccgtcctcgcaccggctggccaaattccgcggccaacggcagaaatggtttgcgctacgcttcaccggacgcgacgaggagatcgatccgctgacgccgcgcaacggccagcccgcggaattcgatcaatggcgctgggagcgcctcgatcgcgtcgccgatcttgtggtgccgtttcgccgcgacgtctatcgcgcggtcgcgaccagatttgcggaattcgccggctgaatccgccgcgcgtcgcccggcgtcatgccataggtcgcgcggaagacacgatagaacgtcgcgatgctgtcgaagccacacgcgaacgcgatctcgtcgatgccgcgctcctgcgtggcatagagcagccgccgcgcttcattcagcctcgccgccgtcaaggtccgcgcgaacgacaggccggtcggctcgaacagcgcatgcagttgccgcagcgagatgccgagttcggtggcgaccgcggccggcgtcagcgaggcgcgatgcagatcgcgcagcaggatttcgcgcgcggcatggagatggcccgcatgcagcgcggcacggatttcatcctggcgcggccgcaggcgcccgcgcgcgagcagcgccaggcgcaccatatgcgtcacttcgccggcgaactgcccggctcgtaccggatcgcgcgtcatggcgcggaacatggcgccgaccagccgggtcaggcgcgcatcacgcgccagcgcgaccggcggcgcatcctcgattcgcgcgccgagtagaagctcgtcggtgaccgggatcttgaggctgaagaaatgaaacccgtcgttccgttcgggcgtcgagaaatacgggagattggagtggccgaacaccagatcaccattgtgcacgaagtgaacgcgatcgcgaccgatgttcaggtacccggggccgcgcacctgccaggcgagttgcaggctgttgctcggcacccgcgcaatgtccgatgaggtgcggctgacccgataggaggatgccgacatttccgccagcacggcaccgcccaccggcgtcgcggaaaagtgcccgcggaaatcgggccgcttgtcgcgctcgagctcgatcgtgaccccgaacaggcttttgccgcgcacgtcgcaccagtgttcgaaacggtcctgggggcggagcgcatcggtggagaaggtcagcacagtatcttccgtcatgtccggggagaaatcgcgacgcgatcgggccagctcgtcgtcgtgccgcagcttgtcatggccgcacggtccttgctgtaagctgcttcacactgttcggattgcacccttgtgcggcgtttgtcgcgctctgctcgttctcgatgtcgtccgcgaagatctcggcgaccttgcgcgtcaagaataccaggccgcggaacccaaataagcgcggcagaatgccgccagacgcccgtgggtgcaacaagcattcaacgcccgccagggcgtggcgagcgttgaaatcgtttgagccttcgcaggcgataattgaaaaacgtgagctatttcacaggcagagccggctcacccggcgcaatggcgcgatcgctggtcggcaaccgcgccttagtgcatagcggtcgcgttgagctcgtgctggatgctcttgaagtgatcgagccgctcgatcgcgtggtcgagctcggagccttccttctcggaaagcttctcctgcatctcgttgatcgtctcggcgaacttggcgcgatcgagatccgccagcgcggtcgcgacatcggcgagcacggtgaggcccttgtccgacacttcggcaagaccgccgagcacgatcaccttctcgcgcttgccggcggtcgtgatcgtcaggatgcccgggcgaaccgtggcgacgaccggagcgtgcccggcgagcacaccgaaatcaccctccacgccggggacgtcaacctgatcgacctcgccggagaaggcgagcttttcgggggagacgagatcgaagtggaaggttgccatggtctttccgttctttgcgctgtcacccgcgggcttgacccgcgggtccatcagtcaaaatacttctcgtgcgatggatcgccggatcaagtccggcgatgacgacatctcgaagcttaggccgcctcggcggcgagcttcttgcccttctcgacggcttcttcgatggtgccgaccatgtagaacgccgcttccggcagatggtcgtacttgccctggcagagatcgcggaagcccttgatggtgtcggcgaggtcgacgaacttgcccggcgagccggtgaagatttcggcgacgtggaacggctgcgacaggaagcgctcgaccttgcgggcgcgagccaccgtcagcttgtcctcttccgacagttcgtccatgccgagaatggcgatgatgtcctgcagcgacttgtagcgctggaggatctgctggacgaggcgcgcggtgttgtagtgctcttcaccgaccaccagcgccgacagcatgcgcgaggtcgagtcgagcgggtccaccgccggatagatgcccttttccgagatcgcgcgcgacagcaccgtggtggcgtccaagtgcgcgaacgaggtggcgggcgccgggtcggtcaagtcgtcggccggcacgtagatcgcctgcaccgaggtgatcgagcccttctgggtggtggtgatgcgctcctgcagcgcgcccatgtcggtcgcgagcgtcggctgataacccaccgcggaaggaatacggccgagcagcgccgacacttccgaacccgcctgggtgaagcggaagatgttgtcgacgaagaacagcacgtcctggccctggtcgcggaagtgctcggcgacggtcagaccggtcaggccgacgcgggcgcgggcgccgggcggctcgttcatctggccgaacaccagcgcgcacttcgacttcacgctcgggtccggattgtgcggatcggcgttgaccttggattcgatgaactcgtgatagaggtcgttgccttcacgggtgcgctcgccgacgccggcaaacaccgagtaaccaccgtgcgccttcgcgacgttgttgatcagctcctggatcagcacggtcttgccgacgccggcgccgccgaacaggccgatcttgccgcccttggcgtacggagccagaaggtcgacgaccttgatgccggtgacgagaatttcagcttcggtcgactgatcggtgtagctcggcgcttcctggtggatcgcgcgcacgccttcggccttgatcggaccggcttcgtcgatcggctcgccgatgacgttgatgatgcggccgagcgtgccttcgccgaccggaacgcggatcggctcaccggtgtcggtcacttcctggccgcgcaccagaccttcggtgatgtccatcgcgatggtacggacggtcgattcgccgagatgctgggcgacttcgagcaccaggcggttaccgccgttcttggtctcgagcgcattcagaatcgccggaagatggccttcgaactgcacgtcgaccacggcgcccgtgacctgggtgacgcgaccgatctggttggctgctgtagccatggactgttctccttcgaaatctgccttagaccgcctcagcgccggagatgatttcaatcagctccttcgtgatctgggcctgacgggttcggttgtaaatcagggtttgcttgcgaatcatctcgccggcattgcgggtcgcactgtccatcgcgctcatctgggcgccgtagaacgaagcattgttctccagcagcgcgcggaacacctgcaccgcgaggttgcgcggcagcaggctgccgaggatctcgtcctcctcgggctcgtactcatacgaggtggacggagccgcattggcggcaggcgcggccacctcgagcgggatgatctgctgcgcggtcgggatctgcgcgatcaccgactggaagcgcgaatagaacaacgtgcagacatcgaactcgccggcctcgaaccgcgccagcaccttcttggcgatgtcttcggcgtggacgaaaccgatctgtcgcaccgaacgcaggtcgaggtgctcgacgatgcggctgtcgaacgtccgccgcaactgctcgtagcccttgcggccgacgcagaagaacttgacgtccttgccctgcgcaagcagcgactgcgcccgctcgcgcgccaggcgcacgatggccgagttgaaggcgccggacaggccgcgctcaccggtgcagaccagcagcaggtggacctggtccttgccggtgccggcgagcagtgccggagcgccgggcgagccgttggccgcggcggcgatattggaaatcaccgcatccatcttgttggcataaggccgcgccgcttcggcggcgttctgcgcgcggcgcagcttggaggctgcgaccatctgcatggccttggtgatcttctgcgtcgccttggtcgaggcgatgcggacccgcatgtcttttagtgacgccattcttcgttcaccccggcgatccgaccatgatggtcagatcgcaagcctccgttcgtcacgcccggcgttcgagccggacggcgccccattcgttatgcaaacgtcttggcgaagccgtcgaccgccgacttcagcttggcggcactgtcgtcagacaggtcgcggctgtcgcggatcgcattgaggatatcgacatgcttgccgcgcagcagcgacagcagaccatcctcgaaagccttcaccttgttgagcggaagcgcatcgagatagccgttggtgccggcccagatcacgcagacctgctcttccatcttcagcggcgagaactgcggctgcttcaggagctcggtcaggcgcgagccgcggttgagcagacgctgggtcgaggcgtcgaggtcggagccgaactgcgcgaacgccgccatttcgcggtactgcgcgagctcgcccttgatcttgccggcgaccttcttggtggctttggtctgcgccgaggagccgacgcgcgacaccgacagaccgacgttcacggcgggacggatgccctggaagaacagatcggtttccaggaagatctggccgtcggtgatcgaaatcacgttggtcgggatgtaggccgacacgtcgttggcctgggtttcgatgaccggcagcgccgtcagcgagcccaaaccatgatccttgccgagcttggcggcgcgctcgagcaggcgggagtggagatagaacacgtcgcccggataggcttcgcgacccggcgggcggcgcagcagcagcgacatctggcggtaggcgacggcctgcttcgacagatcgtcatagatgatcacggcgtgcatgccgttgtcgcggaagtattcgcccatcgtgcagccggtgaacggcgcgatgtactgcatcggcgctggatcggacgcggtcgcggcaacgacgatcgagtattccagcgcgccctgctcttcgagcaccttgacgaactgcgcaaccgtggagcgcttctgaccgaccgcgacatagacgcagtacagcttctggctctcgtccggctgggcgttgagcggcttctggttcaggatggtgtcgagcgcgatcgcggtcttgccggtctggcggtcgccgatgatcagctcgcgctggccgcggccgatcgggatcagcgcgtcgattgccttcaggccggtggccatcggctcgttcaccgacttgcgcggaatgatgccgggcgccttgacgtcgacgcgcttgcgttcggtcgcctggatcgggcccttgccgtcgatcgggttgccgagcgcgtcgacgacgcggccgagcaggcccttgccgaccggcgcgtccacgatggcgcgggtgcgcttgacggtctggccttccttgatctcacggtcggcgccgaagatcacgatgccgacgttgtcggtttcgaggttcagcgccatgccgcgggtgccgttctcgaactcgaccatttcaccggcctgaacgttgtcgagaccgtagacgcgggcgataccgtcgccgaccgacagcacctggccaacttcggtgacttcggcttcctggccgaaattcttgatctggtccttgaggatcgcagaaatttctgcggcgcggatgtccatcagcctgcctctttcatcgcgttcttgatcgaattgagtttggtgcgaagcgaactatccaccatccggctgccgagcttgaccaccaggccaccaataatggagggatcgaccttcacgttgagcgcgacgtccttgcccgtcactgatttcagtgcggccttcagcgcgtcgagattcttgtcactgagctcttcggcgacggtgacttccgcactcgcctcgcccttgaacttcgccaccagcgcgcgataggcgcggatcacatcggccacggcgaacagccggcgattggcagtaagcaccttgaggaattttgccgaggtaccggcgatgccggccttgtcgagcaccgcggtcagcgccttcaactgggcgtcggcggcaaacaccgggctgcgaacgaggcgcttcagatcggcgctgtcattgagcatggcctcgaacttgtcgaggtcggccctcacttgatcgacggattgctcgtcgcgcgccaactcgaacagggccgttgcgtaacgaccggacactcccgaaacggacggatcttcagcagccacgtgctcgctcttttttgctgtcaaatccgcaagggaaaaaccgtcgccaccaaagcagcgcctagcgatccaagcccttggaattcaagcgggacttcgattttcgaccggcacaggacgtgccgggaccgttaaaatcgcggctttgctaacatagcaatcgcgcaggtgcaacatgacggcatcgtgagagccgccttgtcgcatgcggttttcgacggccgccgcggacgcgcgaatcagaaaaattcggggtgcggaaatccggcgcagccagcttcgattcgcatcccccgattttgttccatcgcaatttgcatgagcctatgggctcacgcgcaaggaacccgccgcgagccgtcgtttcatttcgcgattacttaccgaaatcttacaatcaggcagatattcagtattcacaggtattcatatcgttaaaaattcgttaacggccaaggttacggaacctcgattgaataccccaaagcggtaacaagatatttcagcccgagacaatcgggatttactgcccaattcgtgcctcattgcgcaaccaaacggctttggtcaacgaagggacgggggttccacttgccgcgttagcggcaatactgtctgagggtcttatcaatgtcgaatatcaagaaggcggcgggcaacgtaacccgctcgcgtacggcgcttgcgtttgttgccgcaacgatgctggtcgggggaagcgtgaccgaggcgtccgcgaagtccaggcaccatcgccaccaccaccatcatcatcaccaagcccgcgccgaaggctcgtcctggcgcgacgccaatgcgtcggtccagtcgtccggtggccacacgttctcggggatggcctccttctacggcaatgagtcgggcagccgcaccgcgtccggccagcgcttcaaccagaacgccatgaccgcggcccatcgctcgctgccgttcggcaccaagctccgcgtcacccatggtggccgcagcgtcgtcgtcaccatcaatgatcgtggcccattcgtccgcggccgcgtgctcgacctctccaccggcgctgcccgcgccatcggcctgaccggtgcgggcgtcggccgcgtcaccgccgaggtcatgtcgtaacgctctttgtttgagcatgatcttttcgggaaaccgcttcgcacttttccggatcatgctcgaacgccttcagtaagcgttgcgtagcgtaccggccgcgaggcctgcttcgcgccaaactgcctgccgtcgccaatgacggcaggctttttctttccgtcattccggggccagaagcctacaaaaagctctgcggatcgacgtcgacctcgagcttcagattgcccttggtcttcgggccggcctccagccattcgcgcagatattgcgacaggtcgacattgcgcagcgacttcaccagcaggcggaagcggtagcgacccttgagcacggccagcggcgcctcggcgggaccgagcacctggatccgctcgtcgagcggcgccaccgcggcgagcttgcgggcaaatccttccgccgtcggacggtcgccggcggagacgatcaggctcgccagccggccgaacggcggatagccggtgcgctcgcggatatcgatctcgctggcgtagaacgcctcgcggtcgttcgcgatcaaggccttgatgaccggatgctctggctggtgggtctgcagatagccgacgccgcggccctgctcgcggccggcgcggccgaccacctggttcaacagctggaacgtgcgctcggcggcgcgcggatcgccgttgctgaggccgagatcggcgtcgatgacgccgaccagattgagccgcgggaaattgtgccccttcgccaccagctgggtgccgatgatgatgtcgacgcgcccctcggcgatctcgttcaattcgctgcgcatggtctcgatcgaggtgatcagatcgctcgacagcaccatggtgcgggcctcgggaaagatgctggcggcctcctcctgcaggcgctcgacgccggggccgaccgcgaccagcgattcctcggccgcgcaatgcgggcagatgttcgggcgcggcatcgagaagccgcaatggtgacagaccagccgctgccggaagcgatgatcgaccagccaggcgtcgcagatcgtgcaggcgaagcggtggccgcagccgcggcacagcgtcagcggcgcatagccgcggcggttgaggaacagcagcgcctgctcgcggcgctcgatcgcgtggcgaatctgctcggccagaaccggcgagatgaaccgcccacgcggcggcggggcgcgccgcatgtcgatcgcttcgatatgcggcatgtgctggccgccgaaccgcgacggcagcgcgacgcgctggtagcgccccttgcgcgcattgacctcactctcgaccgacggcgtcgccgaagccagcacgatcgggatttttgcgatatgagcgcggaccaccgccatgtcgcgcgcgtgataatgcgcgccttcgtcctgcttgtaggcctggtcgtgctcctcatcgacgatgatgaggccgagatcggcatagggcaggaacagcgccgagcgggcgccgaccacgaccggcgccttgccctcggagatcgccgcccagttgcgcgcccgggtgcgcggcgtcagctcggaatgccattccagcggccgcacgccgaagcgctgcgcgaagcggtcgaggaactggccggtcagcgcgatctccggcatcaggatcagcgtctgcttgccgcggcggatattctcggcgatcgcctcgaaatagacctcggtcttgcccgaaccggtgacaccgtcgagcagcgcgacgtgaaagctgccgctcgccgccagcgtccgcagcacgtcgaccgcgctgcgctgctcgcgtgagaaatccggttgcgcataggagggatcgggcaccggcggcgcggccggcggcggcatcgcctcgaccgtcagcgtgccttcgtcgaccaggccgtcgatcacgccggagctgacgccggcctcgcgcgccgcctccgacttgccgtgcagcaagcggtccgacagcacttcgatcacccgccggcgcgccggcgtcaggcgctgcggcggctccccgaccaggcggacgccgagccgcgtccgctccggcccgaggttctcgcccatccgcagcgtcatccgcagcaccataccgcgcgccgacaatgtgtaattggagacccagtcgaccagctggcgcagctccgccctgagcggtggaacatcgagcttctcgctgacgtccttgagccggttgtgcagccgcggatccggcctggcattctcggcccacaccaccgcgaccacctcgcgcggcccgagcggaacagagatcacatcacccggcgcaagctccatgccgcgcggcacgcggtaggaataggtctggttcagcgccacaggcaccagcacgtcgacgacacgcgtcgtcgttacggaggctgagctggggcgcgtggcgtggtccattgaatcagaaaccctgaacccgaccgggctagcaccgcttcgctctcttagcgaacggtaaacgaaggcagtgcgatataatcaggagattagcagcgccaatagccctctacagatggcccggaccgatcagcccatccaaccgctcgagctcgactgcgccgatgccacggtgacgcaggagatgacgcgctggctgtcgcatctgcgcgccgagcggcggctgtcgccgaagacgctcgaggcctacgcccgcgacgtgcgccaatgcctggccttcctggccgaacactggggcgcgcgcgtgacgcttgcggccttctccgcgctcgaagcgagcgatgtcagagccttcatggcgatgcgccgcgcggacgagatcggcgggcgatcgctgatgcgggcgctggccggcttgcgctcgttcggacgcttcctggaacgcgaaggcaagggcaaggttggcgcactctcggcgatccgcgcgccgaaggtggcaaagagcctgccgaagccgatccacatggacgcggcgaaacgccttgccgacgccgacgagcgcgccggcgaggagcgcgagacctggatcctgatgcgcgacgccgccgtgatggcgctgctctatggctcgggcctgcgcatctccgaggcgctggggctgaagcgccgcgaggtgccgaagccgggcgaaggcgacgtgctggtcgtgaccggcaagggcaacaagacccgcatggtgccggtgctgcagaacgtgctgcaattgatcgcggactacgcggcgatctgtccgcaccagctcagtccgaccggaccgatgttcgttggcgcgcgcggcggccccttgagcccgcgcatcatccagctcaccatggagcggctgcgcggcgcgctcggcctgcctgacagcgccacgccgcatgcgctgcggcattccttcgcgacccatctgctcagccgcggcggcgacctgcgtgcgatccaggaattgctcggccacgcctcgctgtcgaccacgcagatctacaccggcatcgacagcgagcgcctgcttgaagtctatcgctccgcgcacccgcgcggctgagacggccggacctcggtccagattagacgccggactccgggcgccgtcatgctgcgttcatcttcatacggataaccaccaactgccgccccttgccttgtgcaccgcattcggcaatcgtggcacagtctcattggaggggaatcatgagcgcacatgaaagtatggagcacgcggagcatgccgagcatgcctcgggcgagaacaagaagatcgcgctcctgatcgccgtgatcgcgctgtgcctggcgctgtcggaaaccctcggcaagggcgcccagaccgaatcgatcagcaagaacgtcgaggcgtccaacctctgggccttcttccaggccaagagcatccgccgcacctcggtgcagaccgcggccgaacaaggcaagctgaacctcgcgaccactaccgacgaggcggccaaggccgcgctgcagaagcagatcgacgactggcagaagactgcggcgcgctatcgctcggagcccgagaccggcgagggttcggagcaactctccgaacgcgccaagcacgccgagcatgagcgcgacgaggccaccgcgaaatatcatcacttcgagcttgcttccgccgccttccagatcgccatcgtgctggcgtccgcgaccatcatcaccagcatcgccgcgctggcctgggtgtcgggcctggtgacgctcgccggcatcgcgatgacgctgctcggcctgttccagccgcatctgctgcatctgcattgaggcggctgggctccgcttgacctccgtcaccctgacagggtcacggaattggcttgctcagtgtcatcaaccgcgcatgcgggtgatccagtattccagaggcggtcgtgcttgagccgataggccgcggcgtactgggtcgcccggtcgagccgggcgacgacaacagcggatgaggaccaagcttcacattctgtcaggatgacgggcgtgagagccgtgcctaaggcctgatgagattaggttgagctggaacggcatcgaaagttcacctctcccttgggagaggtcgatttgcgcagcaaatcgggtgaggggttgcggtctatcgagagagcaagagccctcacccggattgctgcgcaatccgacctctccccaccggggagaggtaaagcaagaccgcgccaagccgattcaaccaaaactcatcccgctttagagcaccttgctggtctgatgcacgcttttgcggaagcgggcgatcaggcgcagcgtgcgcgcggtccagccgacgccatcgccacggatcatgtcgaggacccgctgcttgaccggttcgaccagcgcggcagccttggcgcgcagcgccatgacgaaatcatagagcgccttgaaccagggcatctccagcagttttgaccgcgtcacgtcgaacaggaaggccgtgacgccgacgccgacgatcttggcaaacaggatcagcgaaaccgcgctgaaccagtactggttcgcgagcagccagagcccgaccagcttgagcggaaacaacgggatcagcggcacgacgaagacgatcagcgtcatcgccggcgacagcgaatcgacccggtcggcgagccattgcttgagcgcgcgcagcgggatcaatgcgaccacccgggccacgatcggctcgaggtgatcccacagccaagcctcgatcaggaagatgatcgcaagcaggacccagaacggctgaagcacgcggcgcaacatcgctttgatcctaaagcgcgatgagaccgggttgaatcatcacgcttcagctccttgtttgagcatgatcttctcggaaaaccgcttcacacttttccggatcatgctccctgtttgagcatgatccttccgaaaaaccgcttcgcacttttccggatcatgctgcagcccggctcgcgccggacgttcgatcacatatggatggcgcgcttgcccaccgcaagcgcggcttccttgatcgcctcggatcgcgtcggatgggcgtggcaggtgcgcgccagatcctcggccgaaccgccgaattccatcagaacgcaggcttcgtggatcatttcgccggcttcgatgccgacaacgtgcacgccgagcacccgatcggtcttcgcatctgcgagaatcttcacgaagccgtcagtggtctggttgaccttggagcggccgttcgcggtgaacgggaatttgccgacggtatacgcgacgccggcctgcttgagctcttcctcggtcttgccgaccgacgacacttccggcgtggtatacacaacacctggaatgacgtcgtagttcacgtgaccggcctggcccgcgatgatctccgcgcaggcaacgccttcgtcttccgccttgtgcgcgagcatcgggcctgcgacgacgtcgccgatcgcatagatgcccttcacattggtcgagaagtgcgaatcgatcccgacgcggccgcgattgtcgagcgcaacgccggcttccttcagcccgagaccctcggtgtagggcacgcggccgatgcacacgagcacgacgtcggcttcgatggtctccgcggcgccaccggcggccggttcgaccttggcctgcagcgtcttgcccgaggtgtcgaccgaggcgaccttggcgccgagcttgaagacaaagccctgcttctccaggatacgctggaattgcttcgccacctcgccgtccatgccgggcaggatgcggtcgaggaattccaccacggtgaccttggcaccgagccgatgccagaccgagccgagctcgagcccgatcacgccggcgccgacgatcaaaaggctgccgggcaccttgtccagcgacagcgcgccggtcgacgacacgatgcgcttctcgtcgatctcgatgcccttcagtcgcgcgatgtcggagccggtggcgatcacgatgttcttggtctcgacggtctcggacttgccgtcgccggacacctcgaccttgccggcaccgaggatcttgccggtgcccttcagcacgtcgatcttgttcttcttcatcaggaactcgacgcccttgacgttgccgtcgatgccctgctgcttgaagttcatcatcgccggcagatcgagcttcggcggcgggacgctgacgcccatcttggcgaaggagtgtccggcttcctcgaacatctcggaggcgtgcagcagcgccttcgagggcatgcagccgacattgaggcaggtgccgcccagcgtcgcgttcttctcgacgacggcaaccttcatgccgagctgcgccgcgcggatcgcgcagacgtaaccgccggggcccgtgccgatgacgacgagatcgtaagaagccatgattgaggtcctgtagctaagctctgtgacagttggaggacgcgatccgatcggaagacgcgtcccgctgcgtgatcgtgttctagcgaccgcccgacacgtcgaggatcgcgctggtgacgtaggacgcctcgtccgagatcagccagacgatggcgttggcaatctcatccgcggtaccgacgcgcttcatcggcaccagatgggcaagccgatgcgcgcgatcgggctcgccgccggcggcatggatatcggtgtcgatcagcccgggccggatgccagcgacgcggatgccttcacctgcgacctcgtagccgaggccgaccgtgaaggaatcgatcgcgcccttggaggcggcgtagtcgacataggtgttgggcgcgccgagcttggccgcgaccgaggacaggttgacgatgacgccgcccttgccgccgtgcctggtcgacatccgcttcaccgcctcgcgcgcgcacaggatgctgccggtgacgttgaccgccatcatctgctggatgcgctcggccgacatctcgtcgacgcgcacgccgctcttgccgacgatgccggcattgttgaccagcgcgccgagcgtgccgaagccgtcggcggccttgaacagcgcgagaatatccgcctcgctgccgacgtcgcatttcaccgcgatcgccttgccgttcttggcctcgatcgcggagacgacttcgtccgccgcagcctgattggtggcatagccgaccacgatgcggtagccgcgcgcggcggctgcgagcgcggtggcgcggccgatgccgcggctgccgccggtgatgacaacgaccttgtccgtcacattgatccccaaacgtgagtgcccaatggatcgcgacgcccgaaccgatcgggcgccgcgcgcgagatggtcttagagatccagcaccaggcgggccggatcctccaggctctccttgacgcgcaccaggaaggtgaccgcttccttgccgtcgatcacgcggtgatcgtaggacagcgccagatacatcatcggccgcacctcgatcttgccgccgaccaccatcggccgctcctggatcttgtgcatgccgaggatgccggactgcggcgcgttgaggatcggcgtcgacatcagcgagccgtagatgccgccgttggtgatggtgaaggtgccgccctgcatctcgtcgatcttgagctggccgtcgcgggcgcggcggccgtagtcggcgatcgacttctcgatctcggcgatcgacttgtggtcgcagtcgcgcaccaccggcaccaccaggccgcggtcggtgccgaccgcaacgccgatgtgatagtagttcttgtagatcaggtcggagccgtcgatctcggcattgacggccgggatgtccttcagcccctgcacgaccgccttggtgaagaagcccatgaagccgagcttcgagccgtgcttcttctcgaacgtgtccttgtagagcgcgcgcagcttcatcacctcggtcatgtcgacctcgttgaaggtggtcagcatcgcggcggtgttctgcacgtccttgaggcggcgcgcgatggtctggcgcagccgggtcatcttcacccgctcctcgcgcgcggcatcgtcagccggcgacggcgcacgaacctgcacggcggcggccggctggttgaccggggtcggcgccgaggcggccttctcgatcgcggccagcatgtcgcccttggtgacgcggccgtccttgcccgagcccggaacggtggaggcgtcgacgccgctttcggcggacagcttgcgaaccgacggcgcgagcggcgcatcggccggcggcaccttgggcgcggcaggcgccggagcggcagcgggcgccggcgcggcggccttggcgggagccgcagcggcggcagcgggcttggccgcaacggcaccgtcattgatctggccgagcagcgcgccgacggcaaccgtctcgccgtccttggcgatgatctcgccgagcgtgccggcgaccggcgcgggcacctcgatggtgaccttgtcggtttccagctccaccaacggctcgtccaccgccacagcctcgccggccttcttgaaccagcggccgatggtggcctcggtcacggattcgccgagcgttggaacgcgaatttcagtcatggtcttttcctcgataaccctgcggtcgcaataatgagtccggccaccatcctccaaagcggacgatccggtactccgtgacgacagcgcttgtgctggatgacgcgggataccggatgccccgctccagtgcgcaattgcgcacaaggcggggcatggtgttggtgaaggtcgttagttcagcgcgtcgtccagcagcgccttgagctgcgccaggtgtttcgacatcaatccagtagcggtcgctgccgaagccggacggccggcatagcgcggacgcttgttggctgcgttggtctggttcagcacccattccagataggactcgatgaagtgccaggagcccatgttgcgcggctcttcctggcaccagaccatctcggcattcttgaagcgaccgaactcctgcaccagcgccttcagcggcaccgggtagagctgctcgatgcgcatcagatagatgtcgtcgatgccgcgcttctcgcgctcctcatacagatcgtaatagaccttgccggagcacagcacgacgcgacggatcttgtcgtccggcaccagcttgatcttctcgtccggcagcatctgggcgtcatcgtacaggatgcggtggaacgtggcgctcttgccgagttcgtcgagccgcgacaccgcgcgcttgtggcgcagcagcgacttcggcgtcatcaggatcagcggcttgcggatctcgcggtgcagctggcgccgcagcacgtggaagtagttcgccggcgtggtcggattgaccacctgcatgttgtcctcggcgcacatctgcagataacgctcgagccgcgccgaggaatgctccggcccctgcccttcatagccatgcggcaacaggcagacgaggcccgacatgcgcagccatttgcgttcgccagaggagatgaactggtcgaacaccacctgggcgccgttggcaaagtcgccgaactgcgcttcccagagcgccagcgcattcggctcggccagcgagtagccgtattcgaagccgagcacggcttcttccgagagcagcgagttgatgacctcgtaatggccggtgtcttcgccgccaagatggttgaacggcgtgtagcggctctcgtcctcctggtcgatcagcaccgaatggcgctgcgagaaggtgccgcgctcggaatcctggccggacaggcggacatgatggccttcctgcagcagcgtgcagaatgccagcgcctcgccggtcgcccagtcgatcccgatgccgctgtcgatcgccttggcgcggttgtcgaggaagcgctggatggtgcggtggacgcggaaaccgtccggcaccttggtgatcttgcggccgatctccttgagcacggcgagatcgacgccggtgacgccgcggcgggcgtcttcttcctggtcggcgatcttgaagcccgcccacttgccgtcgagccaatcggccttgttcggcttgtagccggcgccggcctcgaactcggcatcgagccgcgcgcgccagtcggccttggccttgtcgacctcgccctcggtcatcacgccatcggcgaccagccgcttggcgtagatctccagcgtggtcggatgcgaggcgatcttcttgtacatcaccggctgggtgaacgccggctcgtcgccctcgttgtggccgtggcgccggtagcagaacatgtcgatgacgaccggcttgtggaatttctgccggaactcgatcgcgaccttggccgcgaacaccacggcttccgggtcgtcgccgttgacgtggaagatcggcgcgtcgatcatcttcgcgacgtcggacggatagggcgacgagcgcgagtagcgcggataggtggtgaagccgatctggttgttgacgatgaagtgcagcgagccgccggtgcggtagcccttcaggtcggacaggctgaagcattccgccaccacgccctggccggcgaatgccgcatcgccgtgcatcagcagcggcagcaccgagatgcgcatgtcgggcggatcaccgtgctgatcctgcttggcgcgcaccttgcccatcacgacgggatcgacgatctccagatgcgacggattggcggtcagcgacaggtggatgttgttgccgtcgaactcgcggtccgaggaggcgccgaggtggtatttgacgtcgccggagccttcgaccgagtccggattggccgaaccgcccttgaattcatggaacagcgcgcggtgcggcttgcccatcacctgggtcagcacgttgaggcggccgcgatgcggcatgccgaacacgatctccttcacgccgagattgccgccgcgcttgatgatctgctcgagcgcggggatcagcgattcgccgccgtcgaggccgaagcgcttggtgccggtgaatttggtgtcgcagaacttctcgaagccgtccgcctcgatcagcttgttgaggatcgcgcggcgaccttcgggcgtgaagctgatctccttgtccggaccttcgatgcgctcctggatccacgccttctgcgcggcgttggagatgtgcatgaactcgacgccgagcgtctggcagtaggtgcgctcgcagatctggacgatctcgcgcagcgtgccgtattcgaggccgagcacatggtcgaggaagatcttgcggtcgaagtcggcctcggtgaagccgtaggaacgcggatcgagttcctcacggtcgcgcggcgcctcaatgccgagcggatcgagcttagcgtggaaatggccgcgcatccggtaggcgcggatcagcatcagggcgcgaaccgaatcgcgggtggcctgatggacgtcggcgtcggacagctcggcgcccttggcctgcgccttggcggcaagcttggtgccgaccgccttctcgacctgggcccagttgccgtcgagcgccgaggtcagttcgtcacgcggcgtcaccggccagttggcgcggccccacgaggcgccttcggcattcttctgcacgtcggccggggcgtccttcaggctcttgaagaaatcctgccattcggcgtcgacggaggatggatcctgctcgtagcgggcatagaggtcgtcgatataggcggcgttggtgccctgcaggaatgaggagagtgcaaaagcggcgttcgcgtcttggcgagacatggggcagtcctggtgattttttcggttcgcgcgtaggagacggcgcaagtgccggtctgggaaagcgcgccggctggatggatatcctttatcctatctaggtcggatattcctgcctaaaagaaccaagaaatgaatatattttcaaatcttatcaatgccctcgcgcagcgttgatatccgccggccggcgcggttcccgaaacgggaaccggcagaaatcaacccgatccgctggaaagtaccgcccgacggcggttacttcagcatctcggcgagcgtgtgcccaagccgcgccggcgacggcgacaccttgatacctgccgactccatcgccgcagtcttggaaccggcgtcgcccttgccgccggagatgatcgcaccggcgtggcccatgcgacggccgggaggtgcggtaacaccggcgataaagccgaccatcggcttcttgcggccacgcttggcctcgtccttgaggaactgggcggcgtcttcctcggcggaaccaccgatctcgccgatcatgacgatcgacttggtgttctcgtcggccaggaacatctccagcacgtcgatgaactcggtgcccttgaccgggtcgccgccgatgccgaccgcggtggtctggccgaggccctcctgggtggtctggaacaccgcctcataggtcagggtgccggagcgcgacacgataccgaccgagccgggcttgaagatgttggccggcatgatgccgatcttgcactcaccggcggtcatcacgccggggcagttcggcccgatcagccgcgacttcgagcccgacagcgagcgcttgacgcgcaccatgtcgagcaccggaatgccttcggtgatgcagacgatcagcgggatctcggcatcgatcgcctcgcagatcgcatcggccgcgcccggcggcgggacatagacgacgctcgcatcggcgccggtcttctggcgcgcctcggcgacggtatcgaacaccggcaggttgagatgggtcgagccgcctttgcccggcgccacgccgccgaccatcttggtgccgtaagcgatcgccgcttccgaatggaacgtgccgttcttgccggtgaagccctggcagatgaccttggtgttcttgtcgatcaggatggacatggttcgagatgctttcgcgagacagcggtgaaggaactctatggtttgagcatgatcatatcggaaaaccggggaccacttttccggatcatgctcagtggatacgccggtacacgccggtgagcacgtcggcccagccttccgcgtcaggcgagaattgaatcttcatgttgtaggtgttgtcgtcgacgacctcgtagacgtgacgggcattgccgcgcagcgagccgcgcaccaggaccagcgacttgcccgcccagccgccggaggcgggcgacggcgggtagtagccgagcgaatcgtgccagaacaatttgtaggcccggtcgtcgcggtcgtaggtgaagacgccgtgggtggcgaagctttccttgccgttgcgggtctgcacgctgtcctggatcagatagaagccgttgagcgcgatgcgcgcaacgacacgcgaggtggccggaccgccggcggtccagcgcgacgggtagaccatctcgtcgccgttccactcgcccgcgaaaaccgcgagcttgcggtgttcctccagcggtgtcggagcgtcgagatgatcggccatcatcagcctcccttgacggctttcacgatcttctgtgcggcgtcatcgagattgtcagcgggcacgacattgaggccgctctcgcggatgatcttcttgccctgctcgacattggtgccttcgagccgcaccaccagcggcaccttgaggccgacctgcttcaccgcggcgaccacgccctcggcgatcacgtcgcacttcatgatgccgccgaagatgttgaccaggatgcccttcacgttcggatcggcggtgatgatcttgaacgcggccgcgaccttctcgacgctggcgccgccgccgacgtcgaggaaattcgccggctccatgccgtacaacttgatgatgtccatcgtcgccatggcaaggccggcgccgttgaccatgcagccgatcgtgccgtcgagcgcgacgtagttgagatcgtatttcgacgcctcgatctccttggcgtcttcctcggtctcgtcgcgcagcgcgaccacgtccgggtgacgatagagcgcgttgctgtcgaacgacaccttggcgtcgagcacgcggagctggccctgcttggtgacgacgagcggattgatctccagcatcgccatgtccttggcggcaaacgcggtgtagagctgggccgtcagcttctcggcctgcttggcaagatcgcccttcagcttcagcgcctcggcgaccgtgcggccgtgatgcggcatgatgccggtggcgggatcgaccgagaaggagacgatcttctccggggtcgaatgcgcgacgtcctcgatgttgacgccgccttcggtcgacaccacgaaggaaatctccgaggtctcgcgattgaccaggagcgagaggtagaactccttgtcgatctcggagccttcctcgatgtagaggcggttgacctgcttgccgtgcgggccggtctgcaccgtgaccagcgtcgcgccgagcatctgcttggcgtactcgtcgacctcggcgaccgatttggcgatgcggacgccgcccttgtcgccagctgaggcttccttgaacttgcccttgccgcggccgccggcgtggatctggctcttcaccacccagatcggacccggaagctgcttggctgccgcgtcagcctcttccggtttcagcaccggaacgccgcgcgagatcggcacgccgaattcatgcagcagtgccttggcctggtattcatggatattcatggaacgacgctcccaaaccctcgtgcggcgaacttaacgtcagccctgacgctggcataccatataccaatgctcgcgcaactacaaaatccgccagaatttcatcaccttgcacccgacaggcgatcggaatcgcctatcgggccattgccgatcgagattacttgccgagcagatcgggcgcgatcttcttgcaggcgtcgaccaggccctgcaccgcaccgaccgacttgtcgaacgcctcgcggtccttgccggccagctcgatctcgaccacacgctcgacacccttggagccgatcacggtgggcacgccgacatacatgtccttcacgccgtactcgccgttgagataggcggcgcagggcagcacgcgcttcttgtccttcaggtagctctcggccatcgcgatcgcggacgcggccggcgcgtagaacgcggagccggtcttgagcaggttgacgatctcggcgccgccgttgcgggtgcgatcgacgatctcgtcgatgcgcgcctgcgaggtccagcccatcttgacgaggtcgggcagcgggatgccggcaacggtcgagtagcgggtcagcggcaccatggtgtcgccgtggccgccgagcacgaaggcggtgacgtcttcgaccgagacgttgaattcgtcggccaggaagtagcggaagcgcgccgagtcgagcacgccggccatgccgaccaccttcttgtgcggcaggccggaggccttctgcagcgcccacaccatcgcatccagcgggttggtgatgcagatgacgaaggcgtcgggcgcgtacttcttgatgccggcgccgacctgctccatgaccttgaggttgatcgacaagagatcgtcgcggctcatgccgggcttgcgcggcacgccggcggtgacgatgcagaccttggcgccgtcgagcgcttcataggaattggcgccgaccaggttggagtcgaagccgtcgaccggcgacgactgcgcgatgtcgagcgccttgccctgcggcacgccctcggcgatgtcgaacagcacgacgtctccgagctccttgaggccaacgaggtgcgccagcgttccgccgatctgtccggagccaatcagtgcaatcttgtcgcgtgccatgggaaatcagtcctttgaactggtgcaggagggagggtagtcggttgcaagggtggttatccctttcgaatgatccattcaagtcagggcctgcccgatcgcaggccctgccttgaattcgatcaggcatgccagcgacatccgcccggagacacgaaaagttgctccgaaccggaccgcgcgcaagaccaaaatccaaggccgaacttcaagtctcgaccaggccggtcgacgcgccgctggccgaggagtccttccggccgtgcggcagcgccaggtaggactccgaactcatctcgatcaggcgcgaggacgtgcgcttgaactccatcgcctcaacgccttcgtccgcaaggtacagcgacaccggatcggccgcggccgaggccatcagcttcacggcgttgtcatagagcgtgtcgatcagcgagatgaagcgcttggcggcgttgcgctcggcgtagtccatcaccggaatgtggtcgaccaggatcgtgtggtagtcgtgcgcgagcctcagatagtccgacgcggcaagcggcttttcgcagagttcggcaaagctgaagcgcgcgacgccgtgcgacgagcacgggacgtgcagcacgcgtcccttgatcgcgatgtcgcgcgacttgcacggcgcgttgccggtcatcttgcgccaggccgcatcgagctcggcatcggctgcttgatccgccggcaccagccacatcttgacgccgaacaatttctccagccggaagtcggtgcgcgcatcgagccgcagcacgtccatgtggtcggagatctgcgcgatgaacggcaggaacagcgcgcgattgagaccgcccttgtagagatcctcaggcgcgacgttcgaggtcgcgaccaccacggtgccgagatcgaacagcttggcgaacagccgcccgaggatcatcgcatcggcgatgtcggtgacgtggaattcgtcgaagcagagcagccaggcttcgtcgaagatcgcctgcgcggtgagcgcgatcacgtcgccgtcggcgatctcgccgcgcgcgatctgctggcggtagccgtagatgcgctcatgcgcctcggccatgaattcgtggaaatgcgcgcggcgcttgtgctcgaccgggctctgctggaagaacaggtccatcagcatggtcttgccgcggccgacctcgccatggacatagaggccgcgcggcggcttgtcgtccttgtcgccgccgaacagccgtccgagcaggctctgcttgcgctgcggcttgtagctcgcgagccgctcctccagcgcgccgaacgcatcggcggcggcggcctgcgccggatcagcctcgatcgcgccggaggcgaccagggcgttgtagtgttcgagaaaggaacttggcgaggtggacagcatgagcccaccttacggccctagtgcgcggcaaattgcaagccgtgaattgtgccaatggggtatgcaagcgaaagcccttgcataccggccggccgcacgggcctctccggcgtcaggaaacgcgatcaggaaaccctacgcgcagagctcgtaagcatcctcgaccacgtaggggccgccccccgtcgacgcgcgcgacgagaacagcacgaagcgatccgccaggaaggtgcggctcgggaagtagccgcgcacggacagataatccgcgacgtcctggctcgacgcatcatgcagacgcgcgagcgtgacatgtggagtgaatttcctgccctcgggatcgagccccatccgctgcatcatccgctcgagttcggcctgcagttcgatcagcggccggctcggctcgacggcggcaaccaccgcgcgcggcttgcgtccgccgaagctcgacaggccctgcagtttgacctcgaacggtttgcggttcacccgaaacagcatcgtcgcgatctcgttggcccagagaccatcgatatcgccgatgaagcgcagggtgacgtgataattttcgggatcgatccagcgtgcgccgggaaggccaccacgcaagctggagagggattggccgatatcggccggaatttccagaccagtgaacagacgcggcatcgctataatcctcgatgcttggcgcgggttttgggagcccgcaccctgtaacaagcccggcgacgaatcaccgatgcttatttgtacccgagatatgtgactctgcgaagcacgaggcgttaacagctcgtaaacctacggacgcaacgcggcgcgctgcctgtgtttcaactgcgttgccctgataatgcgccgagaaatgcctccaccgtaggcaggatattcttcacgacgatgtccacaccttccgcggtcgggtgcatgccgtcggcctgattgatcttcggattggccgcaacgccatcgaggaagaacggatagagcggcacgccgaaggatttcgccagatccggatagatcgcattgaacttcgccgcatactcgctgccatagttcggtggcgccagcatgccgcacaagagcaccgcgatcttgcgcgcctgcaactttgtgatgatgtcggacagcgcggcgcgcgtcaccgcgggatcgatgccgcgcaaggcgtcgttggcgccgagctcgacgatcacggcatcggttccatcggccaccgaccaatcgagccgctcgcggccgcccgaggcggtatcgccggacaccccggcattggtcatctcgacctttatccccttggcttccaaggctttttgtagtcggaccggaaatgccgcctgggccggaaggccgtaaccggcgctcagggaatcgcccagaaccaccattttgatcggtctcaccggacctttcccctggtcttgcgtctgcgcgctcgccgccgtcatcaagcccataagcaacacgagtatgtgcacgaagattcgcaaccgggcctcgaccgcagcggcggaagtgccatatgaccgaaccatggacagtctcatcgaatcctcttcactgaccgacgtcgagccggacaccattgccgtcaggaacgtcaatctctcgctcggcaccggcgcggcacgggttcatatcctcaaagatatcagccttcgtgtggcagcgggtgaggccatcggcctgatcggcccgtcgggctcgggcaagtcgaccttgctgatggtgatggcggggctcgaacgtcctgacagtggagaagtggtcgtcgacggcacctcgttcaatgccctcgacgaagatgcgctggcacgcttccgcggccgccaggtcggcatcgtcttccagtcgttccacctgatcccgaccatgaccgcgctggagaacgtcgcggtgccgctcgaactcgccggcaatccggatgccgccgcgcgcgctgcgcaggagctgcaatcggtcgggctcggcgaacggctgcatcactatccgacgcagctctccggcggcgagcagcagcgcgtcgcgatcgcacgcgcgcttgcgcccgatcccacgatcctggtcgccgacgagccgaccggaaatctcgacgaaacgaccggcaagcagatcgtcgatttgctgttcaccaagcacgccgagcgcggcatgaccctggtgctggtgacgcatgatctcgcgctcgcgcagcgctgcgaccgcgtggtgcggctgcgctccggccggatcgacggacaatcagccacatgagctttgcgtccgaagtcgcggtgcagagccgcgcgtcgtcgcttgccttccgttacgcgctgcgcgagttgcgcggcggcctgcgcggattctacgtcttcatcgcctgcatcgcgctcggcgtgatggcgatatcaggcgtcggctcggttgccgccagccttggcgacggcctgtcgcgcgagggccgcacgctgctcggcggcgatgtcgcgttctcgctcatttcgcgcgaggccaagcccgacgaggtggcgtatctgcgcacccgcggcgaggtttcgattgcagccacgctgcgcgcgatggcccgcagcagcgtcggcaaactggcgctggtcgagctcaaggcggtcgacggcagatatccgatgctcggcgaactgacgctcgagccgaacatgccggtcgccgatctgctcgccgagcgcgacggcgtttttggcgcggcggccgactcgaccttgctggcgcggctcgacctgaagctcggcgaccgcgtcagcatcggcagcgcgacctaccagatccgcagcgtcgtcgtggccgagcccgacaagctcgccggcggcgtcggcctcggcccgcgcttcctgatcagcgaagccagcctgcgcgccaccgacctgttgcagcccggcagcctggtgcgctggatctaccgggtgaagctgcccgacggcgccaacgacgatcgcgccaccaccgcactgatcgacggtgcgcgcgccgcggcaccggaggccggctgggaggtgcgcagccgcagcaacgcctcgccgcagctcgagcgcaccatcaaccgtttcacccagttcctgaccctcgttggtcttgctgcgctcttggtcggtggcgtcggcgtcgccaatgcggtgaagagccatatcgaccggcgccgcgacgtcatcgcctcgttcaaggcgctcggcgccaccgggcgcgacgtcttcacgatctactgcacgcaagtggtggtgctggcgggaatcggctcggtgatcggcctggtgctcggcgccgcgctacccttcgtcatcgtcggcctgttcggcaagctgctgccgctgccggtggtgcctgccctgcatcccgacgaactcgcgctctccttcatctacggccagctcaccgcgctggcgttcgggctgtggccgctcggccgggtccatgacgtgccggtcgcggcgctgttccgcgagaccgtcgccagcgagtggcaccggccacgctggagctatctggcgctgatggccgtggtggtcgcgctcctgatcggcgtcgcgatcgggctcgcctatgacaagcggatcgccacggtgttcgtcgccgcctcgatcgcggtgttcctgctgctgcgcgggatcgccgagatcctgatggcggtggcgcggcggctgccgcgcagccgcatgaccatgctgcggctcgccatcgccaacatccaccggccgggcgcgctgacgccgtcggtggtgttgtcgctggggctcgggctcgcggtgctggtcaccatcacccagatcgacggcaatctgcgccgacaattcctggccgcgctgccggagcgggcgccgtcgttcttcttcatcgacatcccctccaccgaagcgggccgctttgccgccttcctcggccagatcgcaccgggctcaaccgtcgaggacgtgccgatgctgcgcgggcgcatcgtcgccgcgcgcggcgtcaaggccgaccagctcaagccgtcggtcgattccgagtgggtgctgcagagcgaccgcggcctgacctataccggcgaaattcccaagggctcgaagatcgtcgagggcgaatggtggggcccggactacagcgggcctccgctggtctcgatggagaagaagatcgccgacggcctgggcctgaagatcggcgacgagatcgtggtcaacgtgctcggccgcgacgttccggcgaagatcgccaatctgcgcaacatcgactggcagggcctcggcatcaatttcgtgctggtgttctcgccgaacgccttcaagggcgcgccgcacagccacgtcgcgaccctgacggagccgcatgcgagctcgacccaagcgagctcgaccgacgacgcacgcatcatcaagcaggtcgccgacacgttcccgatggtcaccagcgtccgggtccgcgaggcgctggagacggtcggcagcgtcgtcagcaacctggtgctggcgatccgcggcgccagtgccgtgacgctgatctcggcgatcctggtgctgggcggcgcgctcgccgccgggcaccgccaccgcgtctatgacgccgtgatcctcaagacgctcggcgccacccgggtgcggctgctcggcgcctacgcgctggagtatctgatgatcggttttgcaaccgcgatttttggggtgatcgccggctcggtcgcggcctggctgatcgtgacgcggctgatgacgctgagtttcatctggcaggccggcagtgccgccgcggtcgtggtcgccgcgctggtcgtcacggtcggcctggggctggccggcacgctgctcgcgctgaaccagaagcccgcctcggtgttgcggaatttgtgacaatttgtagcggtggcggcgccgttttgcctaataatgctaggccagagcgacattcagccgcgcgtggaagcttgcctcggatgtgttaatttcccacatatcaatcgggtcggatggccggtttgaatgacacggaattaatgctccgcaaaccgcaccatctgagttagatttacgaccggcgccgcaaatcccttgcgctccaccgggaccaaccacgggaattcgaccatgtcggacctagaccgcaattacgcttctcctttcggccgggccgccgggcgcattgacgctgcggccgtcgacgccggtctgcgcgcctacatgctgcgcatctacaactacatgagcatcggcctcgccatcaccggcctggccgcgctcggcgtctacatgggcgcggtgacgaccgaccagtcggccgccgtcgccaaattcggcaacgcctatctgacgcagttcggctacgcgatgttcgtgagcccgctgaagtggctgttcatcctcgctcccttggcgatggtgttcgtcatctcggccggtatcaaccgcctgcagcccgcgaccgcccagctgctgttctgggtattctcggcgctgatgggcctgtcgctgtcgtcgatcttcctggtgtacacgcacacctcgatcgtgcgcgtgttcttcatcaccgcggcgacgttcggtgcgcttagcctctacggctacaccaccaagcgtgacatgagcggcatgggctcgttcctgttcatgggcctgatcggcatcatcatcgcgagcctggtcaacctgttcctggcgagctcggcgctgcagttcatcgtctcggtggtcggcgtgctggtgttcgcgggcctcaccgcctgggacacccagcggctgaagaacgactacatctacggctacgcctcgcagggtggcgtgatggcggagcgtgcggcaattacgggtgcgctgtcgctctacctgaacttcatcaacctgttcacgctgctgctgcagctgctcggccagcgcgactaagcgcctcgagcgaaccgatcgatccaagccccggcctcaccgccggggcttttgttttgcgcaactgaaaacacggctgcgaagccggccggcgcggcttacaccagcgacagcttgcgatcgatgacgagcagcacccgctcgagttcgtggccacggcgcaggatcaggccggtcggcgaaatcacgctgtacatgccctgcttgcgcgccagccggggatccttctcgatccggtagatcggcatctcggacgcccgccggaacaccgagaacacggcgcggtccttcaggaagtcgatcgcataatcgcgccactcgccatcggcgaccatgcggccgtagagattgagaatgcggttgagttcaagtcgattgaatgtcacgcggttggcttgggggatcgctgcggcggggcgcgccgcggcgcgactcccgctcggatcggtgtcctccgagatcaaactcatcgagcgcctccttgtcatcccggtgacgatcgggttccgaaggccggtgcccccaacttcgggatcgtcacgagagtgacatgattgcgctaagcgccggggcccgcaagggcccattcgcaacgcaaccaggccttaaccacggtcaggcgcgacggattgtcccgaaaaccgaagagtcacgggaacgttagcagaatcatattgctgccccacttccgcccatcgcctgccccgctgccctgcaaaaagataatcctgcgttggcccggtcctttcggttccggattcctcagcccccagccccccggggccgtcgggatcgggcctgttcgcaggggagttaatcccaacactgggccaacgaaagttggtcctttttgtttttggggacctgctcgaccgcacgcgatcgagatgcgtgcgcaagccttcagcgctcgctcttcagcaaatcatcggatgtatgttggtcgccgcgccagcctgcgcgcggccgcgcagacggcaacccgcgcagcaacgcgctaaagcgcgatgagattgggtcgaatcgtcatcgcgctttagctctttgtttgagcatgatcttctcggaaaaccgcttcgcacttttccggatcatgctctagtgaagcgaggtgaatgcggcgccgagcatcggtcccggcttgtcgcgattgccgtcctggacgtacaccgccgcggcatcgaccccatcgcgcgtgatgttctccagcggcaccgtccagctgccggacgagccgttccaatcgccgaccttcaggagattgcgcaccacattgtggtaggtgatctcgtggccgcggttctcgccgcgcgcgatcgagatcggcaccgacttcgagatcgagcagatccagacttcgccgcgcgacaccgcgggagacttcgatgccgcgaccgacacgttgatctgcttgccggtcagcgtcatcgtcaccggcaccgacatcacggtgccgcccttctcggtgctcttgatggcgtcctcgatgctggcgcgatcgctgccgatcacatgcgcggagccgttgaccacggcctgcggcgtgtagacgtcgcgatcgccgcgcatgtgggaataggccttctggcgcgcgctgaagcgcgaatcggccagcgtgtccttccagccgagatagtcccaatagtcgatcggcatgctcagcgcgatgacgttggggtccttcgcgagatcaccgatgatcttgtccgcgggcggacaggacgagcatccctgcgaggtgaagagttcgacgactgcacgcggatcggcgtgagcggggcgtatgatcgcgacgatcgcgcagataccgagcgcaccggaccatcgcgaaatcgaattataggccatcatcgctgtcatactgcgaaccagtcgtgatgatttccatccgtaattgtacggagcatgaagtctgtccctgaacttgcgtgccccaaaacgcgagaaagcggccttttcataggccgccttctttttagccgccactcactaagcagtgaggcacggatcacaattccgcgttggagcacggcccaaatagaccatgctccaacaaaaggccctttaggccgcgagtttgcgcagcacgtaatgcaggatgccgccgttgcgatagtagtcgagctcatccagcgtatcgatgcggcagagcagcgggacatcccgcttgccgccgtcggcggagacgatctcggcggtcagcgtctggcgcggcttcagatcgccctgcagcccacggatcgtgaccttctcgtcacccttgaggccgagcgaggaccatgaggtgccgtcctggaaggtgagcggaagcacgcccatgccgaccaggttggagcgatggatgcgctcgaagctctggcagatcaccgcgcgcacgccgagcaggcgggtgcccttggcggcccagtcgcgcgacgagccgttgccgtattcggcgccggcgaacaccacgagcggcacgccttccgcctgatacttcatcgcggcatcgtagatcgacatctgctcgccgtcgggccagtgcttggtcagaccgccttccggaatattgccgtcggcgcccttcagcatgaagttcttgatgcggatgttggcgaaggtgccgcgcatcatcacttcatggttgccgcgccgcgtgccgtactggttgaagtcggcgggacgcacctggtgctcgctgaggaacttgccggcgggcgaggtcagcttgatcgatccggccggcgagatgtggtcggtggtgatcttgtcgccgaacatcgcgaggatgcgcgcgtcgaccacgtcggtgaccgggtcgggctgcttcttcatgccttcgaaatagggcggattctgcacataggtcgagctcatgttccagcgataggtctcgctttccgtggtcttgatcttgcgccagttggtgtcgcccttgaacacgtcggcgtacttcttcttgaagatcgtcgcggtgacgtacttcttcacgaaggcgttgatctccttggcggtcggccagatatccttgaggaacaccggcttgccgtccttgccgatgccgagcggctcgaccgcgagatccttggtcacggtgccggccagcgcgtgcgcgaccaccagcggcggcgaagcgaggtagttcgcctgcacgtcgggcgagacgcggccttcgaagttgcggttacccgacagcacggcggcggcgacgatgccgttttcgttgatggacttggaaatatcttccggcagcgggccggaattgccgatgcaggtggtgcagccgaagccgaccaggttgaagccgaccttgtccagatcggcctgcaggccggaattggcgagatactccgcgaccacctggctgcccggtgcgagcgaggtcttcacccacggcttggccttgaggcccttggcggccgccttgcgcgccagcaggccggcgccgatcagcacgctcgggttcgaggtgttggtgcaggaggtgatcgcggcgatcacgacgtcgccatggccgagatcgaagtcgcggccctcgaccgcgtagcgcttctgctcgccctcgggcttcttgtattcgccgaccagcgcggtggcgaagccggtcgacaccgccggcagcgcgatgcggccttcggggcgcttcggtccggccatcgacggcacgacgtcggcgaggtcgagcgtcagcgtggtggtgaacaccgggtcagcggacttggcggtgcggaacaggccctgcgccttggcataggcctgcaccagcttgacgcgatccgccttgcggcccgaggtcttcaggtaatcgatggtcgcggcatcgaccgggaagaagccgcaggtcgcaccgtattcgggcgccatgttgccgatcgtcgccttgtccgcgaccgacaggaaatcgaggcccgggccgaagaactcgacgaacttgccgaccacgccgagcttgcgcagcatctgggtgacggtcagcacgaggtcggtcgcggtgacgccctccttgagctggcccttgagcttgaagccgaccacttccggcagcagcatcgacagcggctggccgagcatgcaggcttccgcctcgatgccgccgacgccccagccgagcacggcaaggccgttgaccatcgtggtgtgcgagtcggtgccgaccagcgagtccggataggcgacctcgaaggtgccggtcttcctgccgaccgtcatcttctccttcttggtccacaccgtctgcgcgagatattccagattgacctgatggcagatgccggtgccgggcggcacgaccgagaagttcgagaacgccttctggccccacttcaggaactcgtagcgctcctggttctgcttgtattcctcggtgacgttcttcgcgaacgccttgttgtcaccgaagaagttgacgatgaccgagtggtcgatgacgagatcgaccggcaccagcggattgatcttctcggcatcgccgccgaggttctgcatcgcgttgcgcatcgccgcgagatcgaccacggccggaacgccggtgaaatcctgcatcagaacgcgcgccgggcggaacgcgatttcgtgctcgagctggcgcttcttcagccacttcgacaccgcaacgatgtcttccttcttgacggtgcggccgtcctcgttgcgcagcaggttctcgagcagaaccttcatcgaatacggcagcttcgaaatacccttcagtccgttcttctctgccaggggcaggctgtaatagacgtaggacttggcgccgaccttcatggtcttgcggcatttgaagctgtcgagtgaggtcatgcgaggaatcccaattctcagttatacccggcaagggtaactaaacaccggcgaacgacactggccgagggatggcccggagggtggcttgcggccgccgattgtgtgtgctgcatcaagttccgggcttatagaacctttctagaagcaccgccacaccgacaagtgtgcgacggcgttgcgcgacccaaaaattctcacgcggtagcgaaagatttcagagggctgtgacaagacgaaccatgcggctctcgggacgaaatctgaaatgcgtgcgcggcgggcgcgaggtgttctccaacctcgatttgtcagccgcagcaggcgaggcgcttgccgtcaccggccccaacggcgcgggcaagacctcgctgctgcgcgtcctcgccgggctattggttccggccgaagggacgatcacgctcgagggcggcgacgccgagctcagcctgcccgagcaggctcactatctcggccatcgcgacgccttgaagccggcactgagcgtcatggaaaatctttccttctggcgggaattcctcggcggtgagaccaaggatgccggcgggtgcctggcagccgtggggctcgaccacgccgcgcatctgccggcggcctacctctcggcaggccagcgccgccgcctctcgatcgctcgcctgctctcggctcgccggccggtgtggcttctcgacgagccgacatcggcgctcgatacggccggacaggcgttgttcgtcgccctgatgcgcgaccatctcgccagcggcggcctgatcgtcgcagcgacccatctgccgctcggcatcgacgcgcgcgatctgcggatgggagggacggcatgagcaaaccctcccatctctcgtcgcagcgctcaggtctctccgtcccctccccccttgcgggagggggtcagggagaggggtgccacacgatgcgctctgtccttggatttcaccacgatgagcgatcgagattgtcggagcagcgatcgcgtcgacgatctcgcccggggccacccctctcccccgccctcccccgcaaggggggagggagcgcaccgatcgcgcagaacgatatcggctcacgtagcgatcaccgcggaggcactgcatgagcgcgctggccgcattgatccggcgcgacatccggatcgcgctgcgtgtcggcggcggggcgctgatcggggtgctgttcttcctcaccgtcaccgtgctgatgccgttcgcggtaggtccggatctcgcgctgctgtcgcggctcggccccgccatcctctggctcggcgcgctgctggcgagcctgctcacgctcgaccggctgttcacggccgatcacgaggacggctcgctcgacctcatcgtgatgagccggacgccgctggaactggcctgcgcggccaaggcgctggcgcactggatcgccgcgggcctgccgctgatcatcgccaccccggtgctcggcctgctgctcaatctcgacggcacggcgacacttgccgttgcggcgaccctgctggccggaacgccggcgctgaccttcaccggcatgatcggcgcggcattggccgtgacgctgcaccgcggcggactgctgctggcggtgctggtgctgccgctgtcgatcccggtgctgatcttcggcgtcgcagcctcgcaggcggcgatatcggggccgctgccgtttggaacaccgttctcgatcctctgcgcgctgtcgcttgccagcctcgtgatcggcccgtttgcggccgctgccagcctgcggcacgggctggattgatatgagccagatcaaatcttttcgagaggaattgggccaattgcctgcgacacagcggacgactatcagggtgccatgaagctgaccgagacgctgaccgacctcgccaacccgaccaggtttctggcgctgactgcgcgcatcctgccgtggctcgcaggcgcgaccgcgatcctgctcgcgatcgggctctaccagtcggcggtggcgcccgatgactaccagcagggcgccaccgtgaagatcatgttcatccacgtaccgaacgcgtggctgtcgatgttcgtctggggcgtgatgagcgtcgccgcactcggcacgctggtgtggcggcatccgctcgccgacgtcgccgcgaaagccgcggcgccgatcggcgccgccttcaccttcctcgcgctggtcaccggctcgctgtggggccggccgatgtggggcacttattgggagtgggatgcccgcctgacttcggtgctgatcctgttcctgatgtatctcggcctgatcgcgctgtggcgggcggtggaggatccctcgcgcgcggcgcgggcggcggcggtcctgaccctggtcggcgcgatcaacattccgatcatcaagttctcggtcgactggtggaacacgctgcatcagccggcttccgtgctgcgcatgggcggctcgacgctcgacaaggcgttcctgtggccgctcttggtgatggcgatcgcgttctcgctgctcttcatcaccctgcacctcgcggcaatgcgcaacgagatcctgcgccggcgcgtgcgcagcctgcagatgatgcaggccagccgcgtcacgttcacgaacgagggtgcaggcagcgcgtccaacgaaatcggagcggcgtgacgatgtcgcttggtccctacgcccccttcatcgtgacgtcctatgcgctggtcgccgcagtcgtgctgctgctgatcatctggatcatcaccgactatcgccgccagcaggcacgcctcaaggagatcgaggccagcggcgtcacgcgccgctccggccgccgcgcggcagacacaagatgagcgagcaggcgaccagcaatccgccgcaagcccgccgcctgctggtggtgctgccgctcgtgatcttcctcggcctcgccgggctgttcctgctgcggctctatggcggcgatccctcgaaaattccgtcggcactgatcggccggccggcgccgcagaccgctttacccgcgctcgacggcctggagaaggacggcgcgcccgtccccggtctcgatcccgccgcgttcaagggcaaggtctccatcgtcaacgtctgggcgtcctggtgcgtgccctgccacgacgaggcgccgctactcaccgagctcggccgcgacaaacgcttccagatcatcggcatcaactacaaggactcgccggagaatgcgcggcgcttcctcggccgctacggcaacccgttcggcatcgtcggcgtcgacggcaacggccgcgcctcgatcgaatggggtgtctacggcgtacccgaaaccttcctggtcgggcgcgagggcaccatcgtctacaagctggtcggaccggtgacgcctgagaacgtcaacagcgtgctcaaggtcgagatcgagaaggcgctgcacgccggacagtaagcgcaccgacattcagcgttgccgtgaaccgctgctgaacggcgagcgaaaatgcctgcggcaaaatacttcgacacgtttatctgcggttcatttcgcggccacggcaacgccacgaatgcacccccaactcagcagcgttgacatcaacgttcctctggaggggacatatgcgcaagaccacactcgcttcacttctcgccaccgcacttacgctcggcatgctgacggccacgccgtcgatggcccagggcgttcagccggctacgcctgccgccaaatcggaagtcagcaagatggctcccgcgccgaaggccgtgacgcccgacgcgaagacgacggggatggcgaaggacgacctgctcgacgtcaacagcgccagcgccgaccagctcgacgcgctgcccggtgtcggcaaggcctactcggccgcgatcatcaagggccgtccctacaagggcaaggatgaactggtgcagaagaacatcctgccgcaggcgacctacgacaagatcaaggacaagatcatcgccaagcagaagagctgagaagcatgatccggaaaagtgcgaagcggttttccgaaaagatcatgctcaaacaagaaaccaaagcgcgatgacgatccaacccaatctcatcgcgctttgaggcctcggacgcagcgcggcgcaatcgcccgcgctgcgttccgatctacttccgcaaatcgccggcgtccgcctcgctggtttccagcgagaccggctcaaggtgatagcgcttggtcagcggcatctgcgcgatggcgaagatcatggtcagcggcgtcacgccgaacaccttgaagttcacccagaaatccgtggtctgggtccgccagacgatctcgttgaggatggccatgccggcgaagaacagcgcccagcgcatggtgaggatgcgccagccctgcggcgtcagattgaacatctggtcgaacatcacggcgatgaaggaacggccgaacagcagcccgccgccgagcacggccgcgaacaggccgtagatgatggtcggcttgaccttgatgaaggtctcgtcgtgcagcaccagcgtcagggtgccgaacaccaggacgatcgcgccggtcaccagcgccatgatcggtacgtgtttcgtcaccacataggatgcgatcatcgccgccacgatcgccaccatgaacgcagccgtggcgacgaacaggtggtacttggcgttcgcgacgaagaacacgagcagcggaccgagctcggtcgcaagcttgaacagcggatgtggctgggtcttgtccattaaccctcggtgctggtttgaggcatgattttcgggatcatgcctcgatcccggcaatcgccttggcaaaatccttcgcggtgaagggcgcgaggtcctcaacgccttcgccgacgccgatgaaatgcaccggcagcttgtgcttctccgacagcgcaacaaggatgccgccgcgtgcggtgccgtcgagcttggtcatcacgaggccggtgacgcctgccgtacgatgaaacgcctcgacctgcgacagcgcattttgtcccaccgtggcgtcgagcacgagcagcaccgcgtgcggtgccgacgcatcgaccttcttgatgacgcgcacgaccttttcgagctcgttcatcagctcggacttgttctgcaaccggccggcggtgtcgatcagcagcacgtcgcgcgtctgctccttggctgcggtcagcgcgctgaaggcgaggcttgccgaatccgagccttgcgcgcccgcaatgaccggcgacttggtacgctcgccccagaccttgagctgctcgatcgccgcggcgcggaaagtgtcgccggcggccagcatgaccttgcggccctcggccgagagtttcgccgccaacttgccgatcgtcgtggtcttgccggagccgttgacgccgacgaccaggatgacgaacggctgcttcgagccatcgatctcgagcggcttcgccaccggcgccagcaccttctcgacctcggtcgcaaccacgcccttgacctcgtcggcggagatcgccttgtcgtagcggcccttgccgaccgcctccgcaatgcggaccgcgacatcggtcccgagatcggcgcgcagcagcacatcctcgatatcgtcgagcatggcggaatcgagcttgcgcttggtgacgaggtcagcgaccgcggtcccgatcgaactcgaggtccgcttcaggccgcccttcaggcgctgccaccagctctgttttggagttcctgcagtggtatcgttcatggcgcggacgtgttagccgtttcggctcacaaacgaaagtctcgacgaattgatcgatgttccccaattgaccgcggaagaaatcctgggccgggtgctccaccgcgacgggttgatgctggtgatcgacaagccggccggcatgccggtgcatcgcggccccaagggcggccccaatctggaggcctccttcgacgcgttgcggttcggcctgccgcggccgccggtgctggcgcatcggctggacaaggacacctccggctgcctcgtcctgggacgccaccgcaaggcgaccgcctcgctcgggctgctgttcaagcacagcaagatctcgaagacctactggaccgtggtcgagggcggcccggccgaggatgaaggcaccatcgacatgccactcggccggctcaacgccgagcgcggctggtggcagaagccggatccggacgggcagaaggcgatcaccaactggaaggtgctggggcgcggcgagggcctcgcctggctggcgatggagccggtcaccggccgcacccatcagctgcgggtgcactcatcagcgatgggctggccgatcgtcggcgacaatatctatggcaatggcccccgcttcggcgagccgaccctgcatctgcattcccgcgagatcggcatcccgatttcccgcaacaaggacccggtccatgtggtcgcgccggcgccggcgcatatgcaccagcggctcaaggcatgcggctggaacggagagtgatctccgtggttttacggaccgttatcctttacggaactttcagctccatccggtagtcctgcaggcggcttagaaaagcgcatcacgacgggctcaggacgagcaatgctgactgccgagcaggcaattgtcgacgaagtcgaggcggcgatacgcgccggctccgccgaaaaatgcatcgccaccgccaaacgcgtcaccgacctcttcctcacctccgccggcagcttcaacagtgaacaggtcgagctgttcgacaacgtgctcgaacggctggtcaagaccatcgagctccgggcgcttgccgacatcagcgcccggatggcgcttgccgagatcagcgagcagctcgcaccggtgacccaggcaccgcccgcgatcattcgccgtctcgctggcaatgacgagatcaggatcgcgcggccggttctgcaggagtcgtcgcggctcagtgcggacgatctgatcgagatcgcgcagaccaagagcgagcagcatctgctcgccgtcgccggtcgctggtggctgaaggaagtcgtcaccgacgcattgctggcgcgtcgctttgccagtgtgagccatcgcctggtcaacaatcccggcgccaaggtatcgccggacggatttgccgtcatcctcgcgcaggccgagcacgatccggtcctcgccgtcgagaccggcatccgcgccgatctgccgtcggagctccggcttcagctgctgcgccgcgcaacggaggaggttcgcagccgtttgctggaacgcgccccgccgtatctgttcgaggagatccggcacgcgatcgccgcggtcgccgccggcgtcgagcgcgacatgtcgcaggtccgcgatttcaccgcagccaggcgtcacatcgcaaggctgaaggacaacggcgacctcaacgaggccgctttgctcggcttcgccaggcagcgaagatatgaagagaccgttgttgcgctagcgggcctcgcacagtcgagcatcgaggtgatccgctccctgatgcagagcctgcgcagcgaaggcctgctggtgccgtgccgcgcggccggcctgagctgggagaccaccgtcgcggtgatggaatgccgctatacgaccggctcgatggggccggtcgagcttgcccatgcgaagggccagttcatgaaaatgacccgcgaaaacgccgaccgcctgctgcggttctggcaggttcgcgcgtcgcaaccggcaaggcccggcggacgcacgcactgagtgcgctacgaatgagctttgctaagctctatccatcctacaccacccctctattccctcgtcattccggggctcgcgaagcgagaacccggaatccattcttcgacgaactatgcggccccatggattccgggctctcgccttcggcgagccccggaatgacgatggagagacgcgcgccgtcatgtccggccacggtcagtcgccgcaccatgcccggcacatcgccatcgatcgcgaccggcaggaaatgttcggtgcggccctgccgctcgctctcgatcagcacctcgcgcgtcgcgccgacttcggccccgagccgacgcaccagcgcagcttcgcctgccgcgcgcagccgcttggcgcgctccctgatcgcctcgcctgcgacctgcggcatccgtgccgccggcgtgccggggcgcttcgaatagggaaacacatgcaggaaggtgaggtcgcattgttcgaccagatcgagcgagcgcgtgaacatatcctcggtctcggtcgggaagcccgcgatgatgtcggcgccgaaggcgatgtccggccgcagccggcgcacctgcgcgcagaaatcgatcgcgtcctggcgggaatgccggcgcttcatccgcttcaggatcatgtcgtcgccggactgcagcgacagatggagatgcggcatcagcctgatgtcgtcggcgatgacatcgagcaggtcgcgatcggcctcgatcgagtctatcgacgagatgcgcagccgtcgcagctcgggcacgtggcgcaggatctgccgggtcagctggccgagcttcggcgcgcccggcaggtcggcgccatagctcgtcagatcgacgccggtcagcacgatctcggcgtggccgcgctcgaccagcatgcggacctgatcgaccaccgcgcccatcggcaccgagcgcgaattgccgcggccataggggatgatgcagaaggtgcagcgatggtcgcagccgttctgcacctgcacgaatacccgcggcagcccgcgcgcgtagccgtcgagcagatgcggcgccatctcggtcaccgccatgatgtcggcgaccgcgaccttctcgctggcgccgatatcgaatgcagcgcgcgtcgcctgccaggcggcgccgcgcagcttctcgtcattgccgacgacgcgatcgacctcggccatctcggcgaatatttcggcctgcgtctgcgccgcgcagccggtgaccacgatgcgcgcattgggccgttcgcgtttcagcttgcggatcgactgccgggcctgtgccaccgcctcgttggtaacggcgcagctgttgatgacgatggtgtcggcaagtcccgcctgctcggcctcgcggcggatcacttcggattcgaaggcgttgaggcgacagccaaaggtgacgacatcgacgcccataaccgatccccaacgccctgatcaggcgacgctggcgaacagcgccggatcgaagcggccctcatattcgaaatcggcggtgccggtcatcagcacgtgatcgtcgcgctcgcgccactcgatgccgagcttgccgccgggcagcgtgatctcgacgatccggttggcgcgcttcagccgcgccgccgcgaccgccgtcgcacaggccgccgagccgcaggcccgggtgaggccggcaccgcgctcccaggtgcggatcgtgatgtggtcgcgatccacgatgtgcgcgagcgtgatgttggcgcgttccgggaagatcggatggttttccagcagcggcccgaaccgttcgaggtcgtaggcgttgacgtcgtcgacccagaacaccgcgtgcggattgcccatcgagaccaccgagggggaatgcagcaccggattgtcgatcggcccgacctgcagctcgatgtagcgggtgtcgcgaaattcctcagccagcggaatgtcctgccagccgaacttcggcgcacccatgtcgacagtatagagatcgggcgtcggcccctgccagcaattgagcaggccggcgcgggtctggaacgttgccgtggtctggccagtcttctcgaagatccgccgcaccacgcagcgcatgccgttgccgcaggcgccggcctcagagccgtcattgttgtagatcgtgatgtacgcctcggtgccgtcgagccgcggcggctgcagcaccatcaactggtcatagggcgctccggccggcgaggccacggcgcgcgcctccgccgccgagacgactgcccgacctggtgcctctgaatcgcgcaggtcgacgacgacgatctcgttgccgatgccgttcatcttggcgaatgcgtgattggcgagcgcgctcatcgattttcccaaattctgcccggttatatggcgagaggtggccgattagccagcctgaatggccctatgacacatctgtcatgggacgaatgcagaactcgcgtgttaggaatatcgcacctcgcggaccgtgcgcgccgggacagatcgagcggccgtctgaggaaggggatggagaaataccaatgaaccgtatcaacacgctccgcgcggccctggtcgcgctgctccctttggccgcgatcgcactggcaagcccggcgcctgcccagtcgccgtccgcctcgcccgctcccgcggcgagcccgagcccgacccccgccccgaccccgtcggcaacgcccgtgccaccgccggccgagaccaagtcgccggctgacagcccggccgcgtcgcaatctccgacgccgccgccggccgccccggtccagaccgccgacccgttcggcgagtcgttcaccttggagcccaagaaggtcgtgatgctgaagggcacggccaattgggattccgccttcgacgcgctgatcgaggcgttcaagcagctcaccgccctgctcgacaaggacggcatcaagccgtcgggcaacccgatgatcgtctacacctcgaccgacgacaccggcttcaccttcatcgcggaaatcccgatcgatcaggacgcgaagaacctcggcaagaacatgagcatgggcaattcgcccgacggcaaggcgctgaagttcgtccaccgcggttcctacgacaacatggacaacacctatgaggcgatcaccaatcacctcgacgacaagaagctcgaagccaaggacaccttcatcgaggaatacatcaccgatccgctgaagaccgccgaagacaagcttgtaatcaacgtctacgtacccttgaagtgagcccaatgacccatcgccttccgttcgccgccgctctcctcgcaaccaccctgctcgctgcacccgcaatggccgattccgacttcccgccggcgatctcggtcaccggcgaggccaccgtatcggcggcgcccgaccaggcgcagctcgacgccggcgtcaccacggacgccaagactgcgcgcgaagcctccgacgccaacaatgtgacgatgggcaaggtgctggcggcgctgaaggccgcggggatcgcggagaaggactaccagacctcgcggctgtcgctgcagccgcaattcgccaaccgtccgccgtcgtcgccgaacgcgccgcccagcatcgtcggctaccatgcgagcaaccgcgtcacgatcaagctgcatgacgtcagcaaggtcgccggcgtcatcgacgtcctggtcggcgccggcgccaacgatatcggcgcgctcaatttctcggtgtcgcaggcctcgaagctgctcgacgacgcacgcgaaaaggcgatcgccgacgcccgccgcaaggccgagatctacgccaaggccgccggcgtcacgctcggcgcgccgctgaacatttcggaagtcggctcggcgccggtgccgatgttccgcgccaagatggccacggccggattcgccgcggcaccgacgccggtcgcgcagggcgaggaaaccctgacggtgaatgtgagcgtgtcgtgggcgatcaaggagaaataagagttactgtcgtcccggcgaaggccgggacccataaccccaaatattgattgttgcgcgacgctggggctgcgcttccgttcgcaaccaaactcggtggtaatgggtcccggcccccgtgcgcaattgcgcactaggccgggacgacagctgctaaatctcgaacacctgccccggcttcaacgccacgaatttctcgcgcggcactttcgccgcatccaacgcctcgccgagcgcgatcgcgggcgcgtcgatcgcttcgtcggtcaattggaacgtaccgtggtgatgcgccagcgcctgggcggcgccgcaatcggccagcgccttcaccgcatcctccgggttcatgtgctggtcctgcatgaaccagcgcggctcataggcgccgatcggcaggatcgcgagccttaagggtccgtgcgcgtcggccacacggcggaaatgccggccgtcgccgtagccggaatcgcagacgatgtagagcttgccggccggcgtctccagcacgaagctcgcccacagcgccttgttgcgatcgaacaggccgcgcgccgaccagtgccgcgtcggcaccaatgtcgcggcaacgccgttgccaagctcaacgcgctggtaccagtcgaacgcctcggccttgatcgcggtgtcggacgcacgcatcgtgatgtcgttcccgagcggcgttaccacgcgagggccgaacgcagacgtcagcttcgaaagcgtcgcaacgtcgagatgatcgtaatggccgtgcgacaccagcacgacatcgatcttgggcaatttctcgaacgcgatgccgggatcgttgtgccgcttgggacctgcgaagctgaacggcgaggcgcgcatcgaccacaccggatcgaccaggatgttgaggccgccagtctggatcagccagctggcatggccgacgaagcacagccgcaccttgtcgccctcgacgcgcggcggcggcgtatcggcatgggggcttggcgcccattccggccagacctcgcgcttgcggcgccccccgaactgccaacgcagcacctcgcccagcgatttcggcggcgaaccatccggatcaaagaagtgcaggccgtcgaagtgatccgagacggggccgtcataggttttcatgtaagtcatccagatcgagggcacgccgatcgcagcggcggctccggtcaaggttgcaagaacgcggcggcgggtgatgggcaagcgggttcccgaacaggaggcaggctccgcttatatgggtgaccgcggcgaattcggaaccagctcggcaaatcgacgtgatttcagtatcttaaagctggagctgcgccgactgcggcgaaactttccttgactttgccgccccggcagcgtttaacgccgcgactttctcggaaagcttcgtcttttcgacccgccgactggtcctggaggccagaggcccacgcccgacagcgcgatgcgccctcgggcgcgaaagtgtttggaccatcgtcttggtacaccgtcttggcacggtgccgaggcagactatgtggtcatcacgcgcgaacgcgcggggatggcccgaagcgagtgacgcgcgctcacgggcgcaacgaaggacaacggcattgttcgacaatctgtcggaacggcttggtggcattctcgatcgtctgacggggcgcggtgcgctgaccgaaaaggacgtcgatgccgcgatgcgcgaggtgcgccgcgcgctgctcgaagccgacgtcgcgctcgaggtggtccgcagcttcatcgaccgggtccgcgagcaggcgatcggcgccaccgtcgtcaagtcggtgacgccgggccagatggtggtcaagatcgtccatgacgagctggtcgccacgctcggttccgacggccagaccatcgacatcaactccgtgccgccggtgccgatcatgatggtcggtctgcagggctccggtaagaccaccaccaccgccaagctcgcacgccgcatggtccagcgcgacaagcgcaaggtgctgatggcctcgctcgacgtctaccgcccggcggcgatggagcagctcgcggtgctcggccgcgacctcgacattcccacgctgccgatcgtcgcgggccagataccgccgcagatcgcgaagcgcgcgctcgaagccggcaagctcggcggctacgacgtcgtgctgctcgacaccgccggccgcaccacgctcgacgaagacatgatgaaggaggcggccgagatcaaggccgccgccaacccgcacgaagtgctgctggttgccgactcgctcaccggccaggacgcggtcaacctcgcgcgcgcgttcgatgaacgcgtcggcctcaccggcatcgtgctgacgcgcgtcgacggcgacggccgcggcggcgccgcgctgtcgatgcgcgcagtcaccggcaagccgatcaagctgatcggcactggtgaaaagaccgacgcgctggaagacttccatccgagccgcatcgccggccgcatcctcggcatgggcgacgtcgtctcgctggtcgaaaaggccgccgccaacatcgacgccgagaaggccgcgcgcaccgccgagcgcatgcgcaagggtcagttcgacctcaacgacatgcgcgagcagctgcagcagatggccaacatgggtggcatcggcggcctgatgggcatgatgcccggcatctccaagatgaaaaaccagatcgcggccgccggcatcgacgacaagattctgaagcgccaggtcgcgatcatcgattcgatgacgcggcaggagcgcaagaaccccgatctgttgaaagcgagccgcaagaagcgcatcgcggcgggcgccggccagagcgtcgaacacgtcaacaagcttttgaagatgcaccggaacatggccgacatgatgaaggccatgggaagcggcaagcgcggcccgctggccggcatcgcgcaggcgatgggctttggcggcggtatgaagccgccgtcgccggaagagatgaaggcgctcgccgagaagatgcagggcggcgccggcggcggcctgctcaatctgccgaaggatctgccggccgggctgcgcggcggcctgccgaacgtgccgggcctgaccgggctttccggcaagccgatgctgccgggcctcggcggctttccgggcaagaagaaatgaggaattcgtcgcgacggctcagatgccggcgcgacgcggaatgccaatcaatcgaacacatcgacctttgaaggagaactgaatgtccgttgttatccgcctcgctcgcgcaggcaccaagaagcgtcctgtctatcacgtcgtcgtcgccgactcgcgctttccgcgcgatggccgcttcatcgagcgtctcggccacttcaatccgctgctgccgaaggacaacgaggcccgcctgaagctcgacatggagaaggtgaaggcctggctcgccaagggcgcgcagccgtcggatcgcgtgacccgcttcctcgacgccgccggcgtcaagaagcgcgcgccgcgcaacaaccccgagaaggccgtgccacgcaaggagcgcaaggcgcaggccgaagccgccgccaaggcctaagctgaacggcgaccacggtggctgccccggtctgtgtcgcccgtatcggcgctgcgcatggcgtgcgcggcgccgtccggctgtggaccttcaccgaagatccgctggccgtcagggattacggcccgctgatgaccaaggacggcgcgcgccagttcgaggtcatgcatgcgcgcgaggccaaggaccatctggtggtgacgctgaagggcgtcgccacccgcgatgacgccgaacggctcaacggcctcgagctctacgtgccgcgcgaccggctgccggacaccgatgacggcgagtactaccacaccgatctgatcgggctcgctgcggtgacgacggcagagcagccgctcggcaaggtgatcgcgatccataatttcggcgccggcgacatcatcgagatcgccccgccgcagggcgcgacgatgctgctgcccttcaccaatgccgtggtgccgacggtcgatcttgccggcggccgcgtcgtgatcgacatgccgcaggaaatcgacggcgacgatccgtcggccgcctgacctgcaatcaccctcagcccgtcatccggccctgttgctcgagccaatcgcagaacaccgcgctgtgcggatcgttgctgcgccccgccggaaaataggcgaaatagctccgcgccggcaggctgatggcaggaaacggcgtcaccaggcggccccccgcgagatcgtccgcgatcagcgcggtcggtcccatcgcgacgccgaggccatcgagcgcggcctggatcgtcaggtagaaatgatcgaaggtcagcgccgctgccggctcgagcgcggagtgccccgcttcagtcagccagtcgcgccacagccgcggcatcgaggtgacatgcagcagcgtgtgccgtgagaggtccgcgatctcgtgcagcggcaattgctccagcaacgacggactgcacaccggcaatcttcgctccgacaccaggaagcgggacgagaagccgtgaaacgtatccggcccgccgcggatcacgacgtcgaaggattcaggcagcgcgtcgaccggatcattcgacgtgctcaagcgcacctcgatatccggatgctcggcgcgaaaccggctcatccgcggcagcagccagcgcaggctgaaggtcgcgagcgcattgacgcgcaacaccgcgacagcggcatcgccgcgccgctcgcgatgctgctgcacggccgcggaaatccggtcgagcgccggcgcgaattccgcaagcaaggccgcgcccgccggcgtcaacaccacgcgacgcaccgagcgccggaacagcgccggcgcacccagccattcctcgagcaggcggatctgctggctgaccgcgccatgagtcacactgagctcggcagcggcttccttgaagctgccgagccgtgcggcggcctcgaaggcacggaccgcattgagcggcggcaggctgcggcgtgggacgaacatgtccacctaataccagattttctaacgcatgatccgattattactgatttgtgacaagcgctttgccgacgcatagtgcttgcaagcttcttgtatttcttctctttccggaaatctctcccgatgcccagctgcgcaaactttagattttctggctccggacggctgcaatgagcgtatccgccgaagccggcgcatcctcctccggcagcgtcagggcaacccgcacgctgacggtgaccgggctcaaccatgccctccacgacggctataccgacctcatctacgtgctgctgccggtctggcaggccgaattcgcgctgagctacgggctgctcgcgctgctgcgcgggctctatgccggcgcgatggccggcttgcagattccagtcgggcggatcgcggagcggatcgacggcaagatcatcctgatcgcgggcaccgcactatcggcgctcggctacgtgtgcgcgggattctccggcggcgtgatcggacttggcctggcgctggcgctctccggcgccggctcgagcacgcagcatccgatcgcatccgctgcggtgtcgcgcgcctatggcgcgggtgcgcgcgggccgctcggcatctataatttctcgggcgatctcggcaaggcggcgatcccggcgctgacctcgatcctgctggtgatcatgtcgtggcggcacacgctgctggtgcttgccttggcgggcctcctggtcgcggcctgcatcgcgctctggatgccgacggtcggcaagggcgccgagcacaagccaaccgccacatcgcgccacgaaggtgcgggccgcggcttccattggctgctcgcgatcggaattctcgacacggcggtgcggatgggctttctcaccttcctgccgtttctgttgcgcgacaagggcgccgcgctgccgaccaacggtctcgcgctggcactggtgttcatcggcggcgccgcgggaaaattcagctgcggctggctcggcgcgcgcgtcggcacgctgcgcaccgtgctgatcaccgaaggcggcacggcagcgctgatcattgcggtgctggtattgccgctggcgccggcgatcgcgctgctgccgctgctcggcgtgatgctcaacggcacctcctcggtgctctatggcacggtgcccgagctgacgccgccgcatcagaccgaacgcgccttcgcgttgttctacaccgggacgatcggatcgggcgcgatcgcgcctgttatctacggcctgctcggcgacgcactcggtccgacactggcgacggctgcaaccgcgctgacggcactggcgatctgtccgctcgcggtggcgctggcgcggcatctcgccggcgaaactaacacgcgcagcgccgacgcctgacgccgcattttgcagcgtcgatctggcgcggtcgcgtccgcgcagtacatagtccgttgtcgatgaggacggccaacggaaagcaaaacaatgacaagcacgcacaaggcctggcggctgcacgcccataatgacctccgcttcgaggatgtgccgacaccgaagcccgcacccgatggcgtcgtggtccggatcgaagccggcatggtgctgtcctacaccaataagctgctgtcgggcgcgctgccctacagcctgccgccgatgccgttcgtcccgggcaccaacgcgatcgcgcgcgtcgtcacgaccggcgagaacgtcacgcatgtgcggagcggcgaccgcgtgttcctcagcccgcatctgcgcggcgacgtgccggatcgtgatccgccgcagatcctgatcggcctcaccgcgacagtgacgacgccggaggcgttcgcgttgcaggcacgctggcgcgacggcgtatttgcggagatcgcgcattggccggccgcctgcgccacgccgctcaccaatctcgacgacaagccggcaaccgagctgatcggattggcaaagctgatcgtgccgttcggcggcttgcagcgctccggcctgcgcggcggacagaccatcatcgtcaacggcgcgaccggctatttcggctcgggcggcgtgatgctcgcggtcgcgatgggcgcaggccgcgtcgtcgccgtcggacgcaagcaggccgcactcgagcaattgcgcgatgcattcggcccgcgggtcattcccgccgtcgtgagcggcgatgcatcggccgatcttcagaccatccgccgtgccgccggcggcagcaccgatgtcgcactcgatttgctcggcgccgcgaagagcacctcgaccacgctgtcctgcctgcgcgcgctcaagcgcggcggccgcatggtgctgatgggcagcgccgaagtgccgcttgaactgtccttccgcgagatgctggccaatgactgggaggtggtcgggcagttcatgtacgatcgcactgcgccgggccagcttgccgccctcgccgccgagggcgtgctcgatctgcgcaagatcaacgtcgcgaccttcgccctcgccgacttccgccgtgcggtggacgcggccgcgatgatgcagagcctcgatctgacggccgtggtgccgtaacccgcaatcaaaagacaacattaaatttaggcaaggtcgcaaccggaatgccgacaaatgcttgcgccggattcccggctcaggcacgctgtggttgtttgagcaaacttgtaccaaccctccgcgacgcgctggatttcgtccatcgttgatcttcaggcatcagagacattcaatgttgcgcagccctgtcttcgcgaccatcgctctccttgcgacggtcggccccctttcggcccagacgccggccccatcaccaccagcggctgcagcgcctgccgctgaaacgccgaacagcccggaaccgatggaagacgcccaaaccggcgatcactggacctaccaggtgcgggacgacattaccggcgacatcaagtcgaccaccacctacaccgtgaccgacgcctcggcttcggagatcaacatccgcttttcgttgctcgggaatccggtcgttggctaccaaacattcgaccgaacctgggatctgacgaacaatggcatctggcgattttcgcccaatgatggcaccggcatccggccgccgcttacggtgggcaagagctggtcattcaagaacaccgcgctcaacaccaaggccggtaacagcctgaagcgctccgggacggccaaagttgtcgcgcaggaaagcgtgacgaccagcgcaggcacgttcgacactttcaagattgaaaccaccctacaggaagacaacgccgctgacgcaaccaagaagctgcaattcgtgctggagacctggtacgcgcctgccatcgatcattgggtcaagcgcagctcgatcacgcgttcggacggacgaatccgggacaagagcacggcggagctggtcgattatggccgacgctagatcagccgctggattgatacgccatacggaccgcgccgatcgccggccatttggacgagggaaagttatgctccgctacgccgccattgcagcgattggcctgttcgccagccaggcctcagcacaacaatcgccgggtggcgccgaagcgacagctgcaccgtcgtcgactgccaagccggccgtcgtcatggaagagccgttgccgggcgacttctggacctacgagacgagggatgagatcagcggcaccgtgagcggcgttcgcaacaacctggtgaccgaggtgacccctaccgaaatcagcgtccgctacagcgtcaaggacaagccgatcgaggggctttatgtctacgatcgatcctggaatctgaagagctcggattcctggacctaccgaccgcatgagggcatcggaatccatgcgccgttgaaggtcggcgcgacctggcactccgaaggtgacaacgtcaacaccagcaatggcagcacctggaagaacgccgtccactccaaggtcgttggtcaggaatctgtggtcacgaaggccggcgtcttcgagacattcaagatcgaaaccaccatttccaggcgcccgaccaacgatccgactcgaaaggtcgagattgtcgaacaatcctggtacgcgccggcggtcgatcattgggtcaagcgcacgtccgtgacgcgcagcaacaaccacgtgatggcgagcaactccatggagctggtggaatacggccgcaagaaatagcccggccccgctgagttcgcgctgctccggcggaccgaacgttgatgcagagcctcgacctcacggccgtggtgccgtaaccagaggccatgacatcgcaagagaccccggccgaagcgacaccatggcgcgccaccgtactgaccctgttcccggacatgtttccggggccgctcggcgtcagcctggccggcagggcgctggcgtcgggcctctgggcgctggaggcgcacgatatcagggcgtcggcgaccgacaggcatcgcagcgtggacgacacgccggcaggcggcggtccgggcatggtgctgcgcgccgacgtgctggcggcggcgatcgacgccgctgacgtcgccccaggccggccgcgcctgctgatgagcccgcgcggtcggccattgacccagacccaggtcatggaacttgccgccgggcccggccccctgatcgtctgcggccgcttcgagggcatcgaccagcgggtgatcgaggcgcgggggctcgaggaggtctcgatcggcgattatgtgctgtccggcggcgaaatcgccgcgatgaccctgatcgacgcctgcgtccgcctgctgccgggggtgatggggaagctggcctcgggaaccgaggagagcttctccgaaggactactggaatacccccaatacacccgtccgcaggagttcgagggccgccagatcccggaaatcctcgtttccggcgatcatgccaaggtcgcggcctggcggctggcccaatccgaggccctcacggcggcccggcggcccgatctctgggccaggcgtgccggccaaaaagccgcgccgcgacggacaaaaaacacgacagacgggtgacaaaccctgcgctttgccttataggcacggcctaatccgcacacgcgcaggatagatggacgtttgcgcagcccgccaaaggctgggcgcgccgccgatggagatttcgatgaaccttattcagcagctcgaaaaagagcagttcgacaagctcgccgccaccaagaccattccggaattcgggcccggcgacaccgtcatcgtcaacgtgaaggtggtcgaaggcgagcgcacccgcgtgcaggcctatgaaggcgtttgcatcggccgttccggccagggactcaacgagagcttcaccgtgcgcaagatttcgtacggcgagggcgtcgagcgcgtcttcccggtgatgtcgccgatgatcgactcgatcaaggtcgtgcgtcgcggcaaggtgcgtcgcgccaagctctattacctgcgcaacctgcgcggcaagtcggcccgcatcgtcgagaagcaggaccgccagaccgccgtcggcgagtaaacgtttcccttaaaaggggatgtgaccaaaagcgcggggcctgccccgcgctttttcgttgcggcatacctatctgacgtagcaccccgcgcatcgatcgattgtcgcgggcgcgagccctgtgttagaaatttagaatggttccggatcaagcaaaccagtgctgcccaagtcagacctgcaagcgcgtcgtgatcgacgatcgctcgcggctgcccggccgcttcttcgggcggtttgcgacgtcggcaacgtctgagcttagacgcgcagcgtaacgctgcctggacgctttcgcctgctcgcgcgctcaagacgcgctcacaccattcaacactgaatttcttctggagctgaagctcatgtcaagaccgaccacgctgtacgacaagatctggaacgaccatctggtccatgaggccgaggacggcacctgcctgctctacatcgatcgccatctggtgcacgaggtgacctcgccgcaggcgttcgaaggcctgcgcgccgccggccgcaaggtgcacgcgcccgagaagacgctcgcggtcgtcgaccacaacatcccgaccaccgatcgctcgaagccgaaccccgaccccgagagcatcgagcagatgcgggtgatggcggagaacgccaaggaattcggcatcgaatattacaacgagttcgacaagcgtcagggcatcgtccacgtcatcggcccggagcaaggcttcacgctgcccggcaccaccatcgtctgcggtgacagccacacctcgacgcatggcgcgttcggcgcgctcgcgcatggcatcggcacctcagaggtcgagcacgtgctggcgacgcagacgctgatccagaagaaggccaagaacatgcgcgcgatcgtcgacggcaagttgcccgaaggcgtgaccggcaaggacatcatcctggcgatcatcggcgagatcggcaccgccggcggcaccggctacgtgctggaatatgccggcgaggcgatccgtgcactgtcgatggaaggccgcatgacggtctgcaacatgtcgatcgagggcggcgcgcgcgccggcctggtggcgcccgaccagaaggcgttcgacttcctgcgcgaccgcccgaaggcgccgaagggtgccgcctgggatgccgcgatgcgctactgggagacgctgcgctccgacgagggcgcgcatttcgaccacgagctgcggctggacgcggccaagctgccgccgatcgtgacctggggcaccagccccgaggacgtcatctcgatcaccggcttcgtgccggatccggacaagatcgcggacgaggccaagcggctctccaagcatcgcgcgttgaaatatatgggcctgaccgtcggcaccaagatcaccgacatcaagctcgaccgcgtctttatcggctcctgcaccaacggccgcatcgaagacctgcgcgctgctgcgaaggtcgccgaaggcaagacggtcaacgccaacgtcaacgcgatgatcgtgccgggctcgggcatcgtgaaggagcaggcggaagccgaaggcctcgacaagatcttcattgcggccggcttcgaatggcgcgagccgggctgctcgatgtgcctggcgatgaacccggacaagctgaagccggaagagcgctgcgcctcgacctcgaaccgcaacttcgagggccgccagggcttcaagggccgcacccatctggtgtcgcccgcgatggccgcggccgccgcgatcgccggtcacttcgtcgacgtccgcgactggcggtaaggcaagcgcggtttttgcctcaagctcgagccgttgcggaaacggctcgttaacggcgcgcacgcacactgcctccttgcgaaacaagccttcgctgggagtgcgtgccgtggccgacaaacccgaattcgtcgatatgatcagcgaggcgacgcggcagaagcaccgccgtcgcggagcagcgcgcatcatcgatccgcttcccgaggtcaaggagacctcccgcctcagccattggccgccggagcggtggacgcaatggcggatggagaacctgacgccctggaagatcaaatcctggaagctgaaaaactgggattagcctgaaaagtgaacgggcgccgcgaggcgcccgctgtcgttttcaggcgtcaccagtagacccggtacggccgccaatagtgccggtgatgccaccacggccggcagattcggcgcggcccgtaataggtccagatcacccggcaacgatggtgatggtaataggccgggtaataatagggatagtaggacgatccgtagaagtagcggcgatggtggaagtgccgccggtaatagggccggtagccgtaacggtaaccgccgccatggaaacggtggtagccaccataatggcgatggaagccgccatagcgatagccgccgtgaaacgccggcgcggcgcggaagccgccaccatggaagccgcggaaaccgccgccatggaaaccaccgccgtgaaatccaccgccgtggaaaccaccgccatgaaatccgccgccgccgtgaccgccgccaccgccatgccgaacctgggtcgtcatggcatcggccgcagattttgccgcgggcacggtgcccgggctcgccaccgacagcgcttcggcgcgttgctgcgaggcgatcgacaatgccaagaccgcggccgccgcaacaccgagacggcgcagcagcccgcaccgcaaagtgctctccctcatctctgatcctccctgacaacagcgatgacagccgcgctgcatggcagccggtcgcattgcgttcattgcagtcgctcccggcacgacgctagaaacgcgcaactgaatgcgccatgaacgcgcaaggcgcgtgcggcaaaaagtccggaggggaacgtcggtgactgtctatgtgatcgtgcaactcaagatgaccgaccgcgccgcttatgatcggtatcaggcacgcttcttcgatgtgttcaggaagttcaacgggcggctgctgtcggccgacgaacatcccgcggtccttgaaggcaattgggaccgcgacaagctggtgctgatgtcattccctgacgaggcggcattccgcgcctggtcggaatcgcccgaatacgtcgagatctcccgggatcgcaaggccggtgcgcaaggcattgtgctgctagcgaagggctttgcaccatgacactgccgaagcggctccgattggagccgctctcctgttgcgccatttgtgccgcgcatcgtgcgacgtggttcgtcaccagtacgggccgaacccgaagccaaaggtgaacggcgccggcgccgcgtaggggtagggctgataataataaggccgtccatagtaataggagccgtacggccgataggccggatagggctggtagtacggtcggtaataggaacggtagccgcggtgataatggtggcggtggtgatggtaatggcgatgatggcgctgggcgctgaagtccgtcgccttgcccgcttgcccttgtgccgcagcctgcggcttggctgatgccgcggcctttgccgaggccggcgccgtcaacgcgaatgcacaagcgacagcggcaacaccgatccatctcatcatgatcaactcctgcagattgcgatcgagatcatctcgcgcgcgcgaatctgccggtttgatggctgagaacgacgacaggcccgctgctcacgggcctgtgtctcaactgcgctgatacgccgcgcgatcagcggcgccagtggcggcgatggccccagccacggtgatgcccgcgatgccagccgcggtgccagccatgaccacgaccatggccatagcgtacctgcgtggtggtctggttcgcattgtcctgaaccgttgcggcggtgcctggcgtcgtgagcgacatcgcgctcgcgcgctcggccggcgccgccaagaccagcacggcaccgatcgccgcaagccccagaaccttcatcaccttcatgcgctaatctccttgattgctggatgtcacgtcctgcaacgacgactcgcattcgaatcgacccccgttgccgcgacgcagatcgcaagcacaatgcggatgacgtgagcgggaagtgaataactgcgccacgatgatgaatgccgctgacgcgctcaggttccgccgcagcgcgtgatttttcgcgcgctcgcgaaacccggcatcggctaccgtcgtatcttgcgtgtttctgttgccggagattgccgtgatgcaatcgaacgtgagcggccacctgacatctgccgtaggcactgctgtacaggttccggcagactcatcagcaacgaggcgacgcttcggatacctcgcgctgctcgcgtcggcgatctggctggtatccgacatcgcagcggcatcgcaaggcccgggcaccggcactggcaccgccggcccgctgacgcggctcgccatggccatcatcgtctatggcgcatcggcgctcgtggtcggtgccggactgatccgcgcgctacgcaaatgacccgaaatgtgcgccgcttcggaccatgctctagccgcgcttgtactgccgcagccggaaggcgagcgcgatgtagagacagccgaagaagatcgcaaaccaggcaatcatccagactaccgccagagcaccggcgcctggctgcaccatcagaatgacgccgaaggcaatcgacaggattccgttgaggatgagcagccattcgttctgcagcacgctgcgcagcgcgatggcgccccagatctgggttgcaccgatgacgatggcccaggcggcgataaacatcagcagcacgaccgtggtcattccggtgtaccagaacgccaccacgccggcgaggatgctggcgatgccgctgaggcccagccaccaacgcgggccggcgtcgccgccggaggcgttgagggcagcccatatcgcaatcacaccgtcgctcagcgcgtaggcgccccacagccaggtcaatgtgatcagcgtcaggccgggccaaatgatcgccagaatgccaaaggcgacggcggccaggccgcgcaacagcagaagccaccaattatccgcgagtgagcgcaacagtccaggaagaggaagatcgttccccggtccgctccgagcatgcgtatcagccatcatacgtctccatcgggttctatcggaggcgcttgccgttgcggcaatcgcctccgttgggaagcgattcagttggcgtattcgaacgcgggcgatgccttcaaggcgtccttggtcgcgccgggcaggatcagcttttcgccatccagcttgaactgcgagaccggaacggcgacgttgtgcttggcgaccgccaggaacccgccggcattgatgatggcgtaagagaccgacttgtcgggcgtgacgatgatgtcctcgatcgcaccgatgcgctcatccatgttgttgtagaccggatgccccaggatcagacgcttggcgctccagccgaccgtcacgtcgcgcagttcgccgtaactgacgccgagcagcgtcgatccggcgacttgtgccagggcaacgaccggcatcgtcaaaccgatgccgacgatgaaaaccataatcctacgcttcatgagaatcttcccgatgtggtcacgttggttattgaccggatcggggcccagttgacgggccccgcacagcagcgatgggttatttcgccgaagccgcgtcggcatcctggcgggcaagccaagcctcgagcgaagcctcctccgcctcgtcgagggcggcgacggcaacgtccgaagcggctgcggcataccgttcggccttggcggcgcgatcctgcagcttgctgagttcgcggttcgccttccattcggcgatcctgtcgccggtggcggtcttcttctgatcggcccactccttgatgtcggcctgagcggccgcgatcttgctgcggccttgttcgacgcgcttgtgaacccggtcgagatggctctgcacgtcctgctcgacgtgtgccgccttgccgctgatctttgccttcagaccctccaggccgctgtcggccatggtgagcttttgccgaagatcttcgcagaactgatcgatgcgttcgcccattttgagcctcctgtcacgagtcgggatcgcaatcaggagtagacggccgcgcggttcgcgaaacggttggatccggccaaacaaccggtgccatccggccaatcgttcggccgatcaggccggcatcgcggctttgccggaaatattcctgtaggcttgcggtgccgcgttggtccagcggcggaacgcctgcctgaaattggcggcatcgctgaagcccagcgactccgagatggcctcgacggtcaggtcggtatcgcgcagatatttgatggccatgtccattcgcaactgatccaccaactcgcgaaacgacgtgccctcctcgcgcagcttccgtcgcagcgtgcgctcgcccatgtttacgtcgtgggcgatctgagcaaagttgagcggtcgcatcagattggtcaggaggacgcgccggaccttgccggcgaccccggcgccaagcttgagctcatccatcagatgatcgcacagcccgaccaccgtcgcgtaggtgatctcgttcccaagccttggcgtgccatcgagccaggtcgcgtcaaacacgatccggttgtcgggttggccgaacgacaccggacatccaaagacttccggatacttcgccgcatcgtcgggccgagggtatgtcacgtggagctctcttgccgcaaacgacgagcccatgacgtcgcgctgaagcgagatgcaaatgccgaactgcgtttccaacacgaacctgtagagggaggcatccatgcgcgaatgcggcatcggattgatggtccagactccgcaaccgccctcttccttgaaatgaagttcggcgagcggcgtcgcgagctgatggtacttctcggcaaactgcatggtctggcgataatccatgctgctgaggatcgcgaacccatacatcccatatgccgagagatgaaaccgcaagcccgcgtgatatgagaagtgaggatcgtgcgagagcctgtcggcgttgcggtagccctcaatcacctgattgagcgagatccgcgtcgcgggcgaggagattgcctcactggagaggtgcacgcctgcaagcgcatcccgcgcagggattccctccgcggccagcgcgtcgatgatcatggcgagcttgatgaccgggtaaaccttgtcgtccgggcccggcgggatcatcgcggcatcggccaagctgacgcccaagtcctagcccggccgccagaagcagttcatgcgcggcgtgatcacggtgccgctcggccggtgctcctgcacataggtcgcggtgcaatcgcgcacggcgttcggaccgggattgtagcgcgggatcacatccggttcccaatgatcgggccgggagcggtagatcggtacgcgcctcaaccggcggtgctcgaccacccgctcgcgtgcgaccggcgccgtctcaccgatgcgcgcttcagccgccgcactctgcgcccgggccccttcggccggaagcaggagcccgactgatgctgccaacagcgctgccgccacgatccttttcatcacgccacccgagccccgattatcggccgcacggtctcccattgcgccgccaaggtcaactgcactggcgccgccgatagcactcgcgctaaaggagtgtcatgtggaccacagcaaaggccccctcgctggccgagatggaagccatggcgcacgagattttcgagcgcctgcctcggacgttccgggccctctgcgagggcctgatcatccgtgtcgacgacttcccgaccgacgaggtgctcgacgagatgcaggccgagagcgaattcgacttgctcggcctgtttcacggcatcggcctgccgcagcagagccatggcgacgtggcccggctgcccaacctggtctggctctaccgccggccgatcctcgactattgggcggaacacgacgagaccctcggccacatcgtgcgccacgtgctgatccacgaaatcggccaccatttcggcctctccgacgccgatatggaggcgattgaggccgatgcggggtaaagcgttttcgagcgaagtggcccccggttcgcgtgaagaaaacgcgtcaaaacaagaatctggagcccgttccgctccatcggagcggaatgggctccagctttgcagaaatgagccttttaccgctgtcacattcgcgataaacaaccggcccgtatcccctagtttttgcccgggaagagcaccgatggacaagttcaccacgctggaaggcgtcgcggcaccgctgaagatcatcaatgtcgacaccgacatgatcattccgaagcagtacctcaagaccatcaagcgcaccggccttggcaaggggcttttctccgagcagcgctacaaggatgacggcagcgagaaccccgatttcgtcctcaaccagtccgcctatcgcaatgcgaaggtgctggtcgccggcgacaatttcggctgcggctcgagccgcgagcacgcgccctgggcgctgctcgacttcggcatccgctgcgtgatctcgacctcgttcggcgacatcttctacaacaactgcttcaagaacggcatcctgccgatccgcgtgtcgcaggaagacctcgacaagctgttcgacgatgccgagcgcggcgccaacgcgacgctgaccatcgacctccccagccaggagatccgcggccccgacggcggcaaggtcaagttcgagatcgatccgttccgcaagcactgcctgatcaacggtctcgacgacatcggcctgacgatggagaagaagaagtcgatcgacagctttgaagccaagctcaaggagcgtgcctgggcttgagctcggcgcatgatcatcgcgccccggtgccgtcaggcgccggggcttttctttgcagcgctacccgttcgcacaccagtgatagctgacgcgcatgctgcctgacatcgtcaccttctggcacggttcgatggacgcgctgcgccggacctgcctgcgctcgcagctggcggccgggcacaaggtcaccgtctatagtttcgatcccgtccccggcctgcccgatggcgtcggcaatgccgcagccgaagcggtgttgccatatgcgttctcggagaggctgcgtccggccgagccggacggttcgtggcgcgactggaccatcctgcaattcagcgacttcttccggatgcggctgatgaagcagcgcgccggcctctggctcgatgccgatgtgctgttgctcaagcccgtcgagatcgacccggcaaagccctatttcgcctgggagcggccgcggcagctcggcaactccgtgctgtatctgccgcacaacgatccgatcgtgcgcgccttcgaagcgctgatgcagcaggatgagctgacgccggactggctggcgctgcgtcaccgcctgaccttcgcgatgcgccggctgcgtggcaaatccaatcgcctctccgacatccgtgtcgcgatcttcggcccggccgcgctcaccgcgctcgcgcgccgcgaaggcgaactacagcacgcgctgccgaagcaatcgttctacgcggtgcacgccgaaccaaaactgttcttcgagccgtcggatttttcgcgctatttgaacgatccgggcatcatcggcctgcacatctcgccgaagggacgcggcaaggaggcgccaatcccgggcagcctctatgcctgggcggcggagaagttcggcagctgacgctctcactgctgcaccctctccccttgtgggagagggtcgcttcgcacagcgaagcggggtgaggggttctctccacacgggagaatctcgcaagcggagacaacccctcatccggcgcttcgcgccaccttctcccacatggggagaagggaagatcacctgccgctaatgccccaacgcagcgatcgcatccgcgatcgcgatcgtgcgcttggccatctcggcgtgcaggcgctcgaccatgcggccgtcgagctggatcgcgccgcgcgagacgttctccggctgtgcgaaggctgcgatgatcttgcgggcctcggcgacttcggcctccggcggcgtgaagatcgcgttgcacgcgtcgatgtggctcgggtggatcagcgtcttgccgtcgaaaccgagatcgcggccctgcgcgcattcctccgcgaagccgtcgatgttgctgatgtcgccataggggccgtcgaggatctcgagcccgtgtgcgcgggtcgcgaggatgcaatgcgtgatcatcgggatcatcgccgcgcgtcccggcttcatccggatccgggtttcgcgcgcgatatcgttcggcccgaacacgaagccggcgagccggatttcggaatccttcgatgcggccgcgagcttgtcggcgtcgagcaccgcgcgtgcggtctcgatcatggcccagacccggatcgaggcaggagcattgatgtcgctgaggcgatcggcgacagcgttgaggtcgtccacggtggaaatcttgggaaccaggatgccgtcaggctgcgccttgccggccatgccgatgtcgtcgacccaccagggcgtatcgagcgcgttgatgcggatcagcacctcgcgcttgccaaaacccctggcggcgaccgccttggcgatctgctcgcgggcgacggccttggcgtcgggggcaacggaatcctccagatcgaggataataccgtcggcgggcagcgtgcgggccttctccagcgcccgtgcattcgatcccggcatgaacaacaggctgcggcgcgggcggatcatcggcattctcctgcggggcttgggctccgccgctgtccattgtttgggcatcgtggcaggaaccatgcttcagcgctgccgtatcatctcaggcggcacgccgaaagtcttgtccccgtcatcggcatgtggttagccagaggccatgaaattctttccgaagcagttgatcgacggctaccggaccttcgcgacccagcggttgccgactgaacagtcgcgctatcgggacctgtcggaacgcggccagtttcccgaaaccatggtgatcggctgctgcgattcccgcgtctcgcccgaggtgatcttcgacgcgggtccgggcgaattgttcgtggtccggaacatcgccaatctggttccggtctatcagcccgacagcaacgcccacggcgtgtcggccgcgctggaatacgccgtgaccgtgctgaaggtgaagaacatcgtggtgctgggccatgcccagtgcggcggtatccgcgccttcgtcgacaagatcaagccgctgacccccggcgatttcatcggcaaatggatgcagatgttcatcaagccgggcgaggtggtcgagcagcgcgaccatgagagcatgcaggacttcgtcacccgcatcgagaaggccgcggtgttccgctcgctggagaatttgatgaccttcccgttcgtccgcgaacgcgtggagaacggcgagatgcagctgcacggcgcctatttcggcgtcgccgagggctcgctgttcgtgctcgaccgggtcgccaaggaattcatcagcgtcactgaagccctgaaggccggcgagtagcgctttcggctacgcctcgtcgtgagcgttgccccagcgatcggagagcgcaagcaacagcgccgagatcacgaacaccaggtgcacggcgacgagccacgtcatccgcgtcgcgtcgaacgcggaatcgatgttcaggaacgcttccagcacgtggatcgccgagatcgcgacgatcgaggccagcagcttctgcttcagcccggcaaagtcgatcttggtgatccagatcggccagttcgggttgcctgacgtgtcgatgcgcgagacgaagttctcgtagcccgagaacaccacgatcagaatgaggttggcgaccagcgtaacgtcgatcagcgccagcgcgtcgaggatgacttccgtcgacttgtagccggacgcatgcagcacgaactcccacagcatgcgcgcgaatttcagcagcagcaccgcgagcgccacgaccaggccgacatagaacggcgccatcagccagcggctgttgaacagcacatattcgaagccgcgcatgatgcgcggcgtcgccggacttgctggggtgggagccgattgttccgacatggttccgaccccggtttgatctgccttacgccgcttttttcttcgcggtgatcagcttgcggttgatcaggacctcggcgatctgcacggcattgagcgccgcgcccttgcgcagattgtccgatacgcaccagaacgcgagaccattctccaccgtcgcatcctcgcggatgcggctgatataggtcgcgtcctcaccggcggcctcatagggcgtgacgtagccacccggctcgtgcttgtcgatcacgaggcagcccggcgcattgcgcaggatgttgcgcgcctcgtccgcggtgatcggattggcgaactcgacattgaccgcctcggagtgaccgacgaacaccggcacgcgcacgcaggtcgcggtcagcttgatcttgggatcaagaattttcttggtctccgccatcatcttccactcttccttggtgaagccgtcttccatgaagacgtcgatctggggaatgacgttgaaggcgatgcgcttgggaaacttcttattgatcagctcgtcattggtgtagacggccttggtctgcgagaacaactcgtccatcgcgtccttgccggcgcccgacaccgattgataggtcgacaccacgacacgggtgatcgttgccttgtcgtgcagcggcttcagtgcgacgacgagctgcgcggtcgagcagttcgggttggcgatgatgttcttcttggtgaacccggcggccgcatctgcgttcacttccggcacgatcagcggcacgtccggatccatgcgccaggccgacgaattgtcgatcaccacagcgccggccgcgccgatcctgggcgaccattccttggacaccgagccgccggccgacatcaggcagatgtcgatgtcggagaaatcataatgctcgagcgccttcaccttcagggtgcggtcgccataggagacctcgatgccgacgctgcggcgcgaggccagcaccacgacctcgtcggcggggaatttgcgctcgtcgagaatgttgagcatttcgcgcccgacattgccggtcgcaccgaccaccgcgactttgtaacccatcgttcactctccgacgaaatatgcccgttcccccgctgctcgcggaaagggaagaggcagcgcttctatgcgagaaaccccgtcaagacaacgttgcgtagctttgagcgttttgatgcatttattccgggccgatccggccgcaccccatcatacgagaaatccgtctgcgctgacgagcttcgtcgacgaggtgtatgccacgctctccgggctgtttgcctatgccgccgtgctcgcgctgttcgtcgtcctcggcgcctatctatggcggcagctgcccgacgcaacggcggtagcggcacccgctgccgcgggctggagcctggccggccgccaagcaccggccttcgccatggatcaacgagataaaacagaggcttacgaaatcttccggcatcccgagggcggccgcaaggatatcttccggtgggccgacgcggatggcgtgctggcagccgagctggagatctaccgtcccggcggcgaggccatggggcctgcggtgaccgagattgccgggcggctcgaccccggcggcgaccgcgggctcgaggccgccggcatcgtcgacagcaagttcggcagcgtcaccctgctgcgcccggcccgccaggacggcagccgcgcctgcctcggcttcctcaagcaggccgacgcgcccgacctgagaatttccggctggacctgccagggcgacagcctgccggcccggcgcgccgcgatcgtctgcatgctgaaccgcctgacgctgctggctgcgggcaacgatccgcggctcgccgcgctgttcgcgcatgccgagctcaagcgcaccgactgcgttacgtccggcctgcccgctttgtcggccgactgggtgacgggcaacgagaacccgctgctgcgcggcgcgctttgatggcgagaccgtggcaaggcactggttttcatgaaacttttgcgtccggacacgcattatctcgcctggtgtggcgcaattgacctagtgacggcctccccaccatggctacaatgtgttccaagtgattttggcggacgcgccagcccccgacggggccgtaatgacgaggatgcgatgaccttgaaactccctgccgcgaacaagctcgtggtgttgcttgctgcggctgccgtcaccgcaaccgcgttcggcatgaccgctgccagcgcgcaggacaccccgagcaagcgcaagcagcaagagcagtatgaccgcgacggccgccgctattacggcgcgcagggcccgaaccgggtctatcagcagggcccgcgtacccgtgtctatgtcaccacgcgctcgtggctcgacgccggcaccgaagtgctgccgggcgaccgcaagttcaacgactatgcgtacccgccggatgtcggctatccctcgttcgcgcgcgagaacaacaaccgcccgatcgatcgtcagccgctcagtccgccgtccgacctcggcggctatccgcggaccttcccgctgtactgagattattcgtcgtcccagagcccataaccaccacagcttgccgtaggagcaagctgtggctccagcatcgcgccacacatccagttggggtaatgggtcccggcctgcgccgggacgacatcgcatttgtggctgcagcgtaaccgttacgcgtgcagcttctgcaattccgtcaggatcgcctcgcccatctgcgcggtgctgaccggcgtggtgccggccgacttgatgtcggcggtgcgcaggccgctggcgagcacggcggcaatcgcggcatcgaccttgtcggcgagatcgcccatgccgaacgaatagcgcagcgccatgccgaacgaggcgatcatcgcgatcggattggcgaggcctcggcctgcgatatcgggcgccgagccgtgcaccggctcatacaaagccttgcgctccttggtcttggcgtcctccttgccgagcgacgccgacggcagcaggccgagcgagcccgtcagcatcgccgcgatgtcggacagcatgtcgccgaacagattgtcggtcacgatgacgtcgaactgcttcggcgtcttgaccaggttcatgccgccggaatcggcgagctgatgctccagcgtgacgtccttgtattcgcgcgcatggacctgggtcatgacctcgttccagagcacgcccgacttcatgacgttgcgcttctccatcgacgtcaccttgttcttgcgcttgcgtgccagctcgaaggcaacgcgaccgatccgctcgatctcgaaggtgtcgtagacctgggtgtcgatcgcgcgcttctggccgttgccgagatcggtgatggtcttcggctcgccgaaatagacgccgccggtcagttcgcgcacgatcatgatgtcaaggccttcgaccacctcgcgcttgaggctcgaggcatccgccagcgccggatagcacactgccggtcgcagattggcgaacaggccgagatccttgcgcagccgcagcaggccggcctccgggcgcacctcatagggcacgctgtcccacttcggaccgccgaccgcgccgaagatcacggcgtcggccgcattggccttggccatgtcggcttccgagatcgacaccttgtgcgcgtcataggcggagccgccgaccaggccctgctcggtctcgaacctggcgatgccctgcgcattcagccagtcgatcacgcgctgcacctcggccatcacctcggggccgatgccgtcgccggggagaagcagcagtttatgggtcgccatggtcgttacctcattcaatcgggcatgcccgtcatcgtctggcgcgagtgctaaaacgccccgcaccgattggcaaggcaccctgagcagggccaaaatggctcttgagcgagccaaaccgcgcctcaagaagccaacaagacggactcatgaccgcagccattatctacgccttcgcctcggccattttcctcggcgccggcgtggtgctggcgcagcttgggctacgcaccgtcgaaccgctgtcgggcgccgcgatcagcgtgccctccttcaccttgctgttcctgctgctgtcgccgctgatcctgcaaggcgagccggtggtctggcgggccttgccgatcttcatggcgatcggcctgttcttcccggcctcgctgacgcttttgaccttcgcctcgaaccgggcgctcgggccggtcatcacctcgacgctcggcaatctggcgccgctgttcgccgtcaccgccgctgtgatgctgctgcaggagccgctgcacccgcagcagctactcggcctcgtcgtcgcggtcgcaggcgccgccgtgatcaccgtgacccggccgcgcgacctcgggcattggcgcagctgggccctgctgctgccgctcgcgagcgcgctggtgcgcggcatcgtgccgccgatcgccaagctcgggctggccgtctggccgagcccgctctgggcttgcctggtcggctacgtcatgtcctcgctggtggtgctgacggtgcaacggatccgcaagggcagcttcctggtgcaggcgccgcgcgaggggcggctctggttcatgctgaccgggatcagcaacgggctcagcgcgctcagcctgttcgccgcggtccgcaacggcccgatcacgctggtggcaccgctcgctgcgatctacccgctggtgaccgtggcgatgagcgctgtcatgctcaagcatatcgagatcacaccgcggatcgtcgccggaaccctgctgaccgtcgccggcgtcgcgctggtcctgatcgcctgattgcccgatacgcaagacagtgttgccgcccgcggtgctgggcaggaccgccgcggcctgccagaatggcgctattgccggagtgaattgtgagagcccccgccccatcctacgcgcatgccgcgcggctgatcctgattctatcgcttgcaccgacggtcggtctcggcatcggccgtttcgcctattcgctggtgctgcctgatatgcgtgagcagctggcctggtcgtattccgccgccggcttcatgaacacgatcaatgccgccggctatctggtcggtgcgctgtgcgcctcgcgcctgattcagcgcttcgggctcaccgcgtcggtgcgctggtcgacggtggcctgcgcgctgtcgctggcgctgtgcgccatctcgggcaattttgccgtgctgagctttgcccgcctgctggtcggcttcgccgccgcgatcggcttcgtcggcggcggcgcgctggcggcaaccattgcgcagtcgcggccggagcgcgccaacttcctgctcagcctgttctatgccgggccgggcgtcggcatcctcgcatccggcctgatcgcgccgttcgtgctgcagggtttcggcgcgggctcgtggtggatcgtgtggtgggcgatgaccttgctctcggtgatcatgaccgtgccgctgtggcttgcgccgttccacgccgacgcgaccgccggcggcttcgtgcggaccaagttcgcgatcacgccggtcctgatctacctcgccgcctacttcctgttcggcgccggctacatcgcctacatgacgttcatgatcgcctatgtccgcgacggtggcggcggcgcggtggcacagagcgcgttctggagcctgatcggcgtcagcgccttcgtcacgccctgggtctggcggcgcgtgctggcgctcgaccgcggcgggctcgccaccacgatcatcctcggcgtcaatgcgctcggcgccagcctgccgatcttcgggcattcgccgctgctgctggcggtctcggcgttggtgttcggcgtcgccttcttcgctgtggtcggctcgaccaccgccttcgtacgcttcaactacccgccgcaatcctggcccaccgcgatcgcggccatgaccatcgccttcggcatcggccagacgctcggcccgatcgtagtcggcgcgatcacggatgcggtcggcaatctgtcggttgcgctcaacgtctcggccgcgatgctgatgctgggtgcgacattatcggcgtttcagccgcggctcggtcggcagtaaagtgtcctcaagagcggatcaacgctgcgcgcagtacagccgttgaatttcctcattttgaaggtccgacatgcgcatcccggccttgattttctttctctcgctctgcggcggcgcgcccgcgtgcgcccaatcacccgcgcaaatcgacgcgattcattgcaaggccgacatctcgacacgacgccctgacgtcgcagcactcgaggcgaagtgcctttcccggatgaagggcatcgccgtacgcagcggcgatgcactgcgcatctcgctccagaatggaaagaccaaatcactcttgagcaacaatcgtgcctgcgaggaaggcaatgcggaaaaatgcgtcgactatcgactcgaagcatactaccccggattgcacttgttcgtcctgaccgcccgcctctacgaggcaaattcggttctcgtcgtaaacgggacgacgggcgcagccacgaatatggatgactcgccgcatctttcgccgaatggcgaacgtctggtcgtcgcattcagcagcgaagcctggagtacggatcgagatatcgcggtctaccggattgagaatggcgcgcttcgcctggaatggagctacaaggccaaggactatgaacagtggaagttcgtcgcctgggatggcgacgcccgcatcaagcttcgcgtgacgttgcacggggaagaccagtccggcgggttgacgacgcgcgatgcggacctgcagctgaccgatgcaggctggcgcttgaacaagcgcatgctcccgtcaccaaaggccacggcggtcaagtagcagacgatgcgccgtgccggcgcacgcggcagtcagcttccgctgaacgaattgtagccctgatcttcccagtagccgcccttgtagtcgttggtgacttccatcgagagcacgtatttcgggttcttgaagccgagcttggtcggcaccctgatcttcatcggaaaaccgtaggcgcgcggcaggatctggtcggcgaatttgaacgtcatctgggtctgcggatgcagcgctgtgcgcatgtccaagggtgaattgtagccgtccttgtcagcgcactggaaccagacatacttcgcccgcgtgtcggcgccgacgagcttgaggaagtcgcggagcggtgttccggtccagctgccgatcgcgctccagccctcgacgcagatgtggcgcgtcacctgcttgacctgcggcagcttgtacagttcgtcgagcgtccacgacttcttgttgtcgaccagcccgcgcacctcgagcttccagtccgccgccgcgacgacaggcgcatcgtcaaggtcgtaatacgcgttgaacgggaacggtttggtgatcatgctctcggggaaggtcggcgccagcgcatccggattgaacatccaggcctgcaccgcgtcgttgaacttcgagaccctcttcagcaattcctcggccgacgaggaatcgaccacgtcgcagccggtcagcagcgtcagcgcaccgaggctggtgcccgccgtgatgaagcggcggcgcgtcagttccggcatcgtcttcaccgcgtcgcggaccagcagcttcttgtcgacaccggggatcaggagattacggagacggcccattttatcctccctcagcgtccgatgatcatagcgcgcaggctcttcggcaccagcagcgcgagcgcgacatggatcaccaggaaggcgacgatcagcgccatgcaggtgaagtggacatagcgggcgatgtcgtagccgccgaacagcgacaccagccagtgcaattgcaccggcttccacatcgacaggccggacagcacgatgacgacgccgatggtgatgatgccggcatagagcagcttctgcaccgaattgtacttgctgagatcgtcatgcgacagcttgaaggtcagcgccgccttggtgtcggcaatcacgccaccgggagtgatcggcagcagcttcttgcggaagcggccggtcgcaaaacccagcgccagataggtcaggccattgaccatcaacagccacatcgcggcgaagtgccagagcagcgcgccgccgagccagccgccgagcgtgatgctgtgggagaacgtgaaactgaacagcggcgaggcgttgtagatctgccagcccgacatgatcatcaggatcatcgcgacggcgttgacccagtgcacgatccgcacccagaccggctggatcaccttcgccggcgttgcggtttctgcctggtggtcgctgacggcgaggctcgtcatggaatgtctctgctggtggtcgttaccggcttatacgccgggaacctgcgttccgttacggggtcgcgcctcatcagttcgatatacagcttcccgtctggtcacaaaaatgcgagccggggcgaggctccggctcgcatgtcgcaaggcgttcagggactaagccgacccgccgggtgtcaggtcgccggcatcagcacggtgtcgaccacatggatgacaccgttcgactggttgacgttggggatcgtcacaatcgaggtgccgcccttcgcatcgacgatcaagaccttgccatcctgcttcttgacggtcagttcctcgccttcggccgtcttcagcttcttgccgtcggtgaggtcggaggcctcgagcttgccgggcaccacatggtaggtgaggatcttggtcagcgtcgccttgttctcgggcttgaccagattgtcgacggttccggccggcagcttctcgaacgccgcgttggtcggcgcgaacaccgtgaacgggcccttgccttccagcgtgctgaccaggccggcggccttcaccgcggcaaccagggtggtgtggtctttcgaattgaccgcgttctggacgatgttcttcgacgggaacatcgcggcgccgccgaccatcacggtcttctcctcggcgcggaccggcgccacgacggtagcggcgatcgtgagggcgctgaaggcggcggcagcgagataggcaatacgcttcgacatggttcgtctcccggtgggtaatcctgccggcgcatcggcaccggcgatgaaggggcaacaacggcgcgaatgggttgatgaaagcgtcgtcgttggcctgagctacgggaggttttcggggcggtttccgaacataattctttgtgattcctgaaaccggctggctcgcgcttcgtaggcgccacgccgcgcgctgcgtcgcgcattccattcagcggaatggtcgggtgcgatgccgcgagcaatttgcttgccgccaccgctcgattggttcagcctgagattgcggcacagcttcgcagagagcagtcgggggaggcagcatgagcagcatcacggctgacggacacgccgcgcctacggtgagcgatgcggataccgatgtcggtccgctcgaacagaaacacctgcaatacgccaactaccgcgccgtcgccggcagcaccgagctgacgaagacccattggcacatcgccaccgccaacgcgctcggctggggcttcgacggcatggacggcgtgatcttcgcgctgatctcgccgatggtgatcaaggaattccagctcaccctgccggagtatcgctccggcatgcagatcgcgctgttcgtcggcatcgccgggctctatttctggccgtggctcgccgaccgctacggccgccgcacactgctcgcggtcaacatcgcgctgttctcgctgctgatgccggttgcggcgctgtcgccgacattcgcagtgttcgtgatcgcgcgctcgctgctgttcttcgcgctcaacggcgaatggtcgctcggctcgatgctggtggcggaaacctggccggcgcggctgcgcggccgcgtcatcagcatcacccgctcggcctggtgcatcggcgccacgctcgccggcgcgatcaccggtctcgtcgccgccaatttcggttggcgcatcgccgtgatggtgcccggcgtgatcgcgctgctggcgatctacatccgctcgacctgtccggaatcgccctattgggtgcgctcgcaagaccgcaagcggcgtatctcggagacgctggcacgcggcggcacggtcagcgacgacgaccgcaactggttcacaaaggccaagtcggtcggcatcagccaggtgttcatgcccgacgtgctgccttcgacattggtcgcactgttcgttgcctgcgcctcgacctgcatctacggcaccgtcggcgcctggatgccgctgtacctgtcgaccgagaagcactggtcgaccaccgaatacagcctcttctatgtgttctacggcctgtgcggctttctcggcctctgcctggtcggctggctgatcgacaagatcggccgccgccgcaccttcatcgtgaccctgatcgagggcgcgatcttcatgacgctctgggtctattccgaggaccgcgtgctgctatgggcgttcggcctgctctggtgtctcggcttcctcggcttctggggaccgagcacgaccctgacggcggagatcttcccgacccggatccgcggcgccgccaacggcgtggtctgggcgatcgcctatctggtcggcttcgtgctgtttcccttcgtctcgatcgcgctgcagcagcacaccggttcgttcgcgctggcgttcctctgcatccccgtgctgatgctcgcgatggcgatcggtgtgttcctgttcgtgccggagcataccggcaaggagctgaacgaaatcagcgagtgatccgctactgatccgtagcgcggatgcgcggggccaaaatatcgaaaaacaaccccatgcaaagcagccgacggcgggccgccgtccgacggcagcttgacacgtcgggcaaatcagggatacatttccaatattccgaaatcgtgcaagtgccccctcgcccgccccccctttcaggaggacggagaggacggaccgcgcttaatccctgttcgccggcgtttgaatgaatccgcggttgtgcgtcgggctgatcaggatctcgttcatgcagacccgcgccggcatgctggcgacgaaggcgatggtgcggccgcaatcctcgggctgcagcatcttggcctgctcggcctcgctcggcaccaccggccgctgcttcaggatcggggttgcgacctcgcccggcgacaggcagcaggcgcgcaggccgttgacgcattcgtccatgttgaaggaatgggtcagcgccagcaccgcgtgcttggtcgtggtgtaggccgggcccggcatcttcgagacgtggcggccggcccaggaggcgacgttgatgatgcagccgtcctgctgcttgcgcatcgtcggcagtaccgcccgcatgcaatagagcacgccgttgaggttgacctcgaccagcttgtcccagccttccagctccatgtcggcccagctgcgcttcggcacgttgatgccggcgctgttgaccagcaggtcgatgcggccgtgtttggcgatgatcgtctcggcagccttgttgacgtcggccttgttgctgacgtcgagcgggatcgcctcggccttgccgccctttttcgtgatgttggccaccacgcggtccagctcttccttgcggcggcctgaaatcaccaccgtccagccgtccgccgccaggaattccgccccggattcaccgattcccgttccaccgccggtgacccaggccacgcgtttcccatgatttgtcatgcaaactgtctccgttgctttccgaagggcgtttttgctaatccagccggagttttaccggcgctttcgcccctcaggggatgttgcatgaacacgaccaccaacgccaatctgttttcccgcctgttcgacggcctcgacgatcccaaccggctcgcgatcgagcagctcgacggcagccgcatcacctatggcgatctgatcgcgcgcgcgggccagatggcgaacgtgctggtcgagcgcggcgtcaagccgggcgaccgggtcgcggcacagaccgagaagtcggtttcggcgctggtgctgtatctcgccacggtgcgcgccggcggcgtctatctgccgctcaataccgcctatacgctgaacgagctcgaatacttcatctctgacgccgagccggcgctggtggtctgcgatcccgccaagctcgagggcatcaaggcgatcgccgccaaggtcggcgcgaaggtcgaaacgctcgatccaaccggcaagggctcgctgaccgaggccgccgacaaggcgccgaaggacttcgccacggtgccgcgcgaaaacaacgacctcgcggcgatcctctacacctccggcaccaccggccgctccaagggcgcgatgctgtcgcacgacaatctcgcctcgaactcctattcgctggtcgactactggcgcttcaccgacaaggacgtgctgatccacgcgctgccgatctatcacacccacggcctgttcgtggcgagcaacgtgacgctgttcgcacgcgcctcgatgatcttcctgccgaagttcgatccggatgcgatcctcaagctgatggcccgcgccaccgtgatgatgggcgtgccgaccttctacacccgcctgctgcagaaccccggcctgaacaaggacgtcaccaggcacatgcgactgttcatctcgggctccgcgccgctgctcgccgacacccatcgcgagtggtccgcccgcactggccacgccgtgctggaacgctacggcatgaccgagaccaacatgaacaccagcaacccctatgacggcgaccgcgtgcccggcgcggtcgggttcgcgctgcccggcgtgacggtgcgggtcaccgatcccgagaccggcacggagcttccgcgggagaccatcggcatgatcgaggtcaagggcccgaacgtgttccaaggctactggcggatgccggagaagaccaaggccgaattccgcgccgacggcttcttcatcaccggcgacctcggcaagatcgacgacaagggctatgtccacatcctcggccgcggcaaggatctcgtgatctccggcggcttcaacgcctacccgaaggagatcgagagcgagatcgacgccatgccgggcgtgatcgagtcggccgtgatcggcgtgccgcatgccgatttcggcgaaggcgtcaccgccgtcctggtgtgcagcaagggcgccgatgtcagcgaggcctcggtgctgaaggcgctcgacggccggatcgccaaattcaagatgcccaagcgcgtcttcgtggtcgacgaattgccgcgcaacgcgatgggcaaggtgcagaagaatattctgcgggacacgtataaggatatctattcgaaggcctgaggaaagcggaatttcgcgagggaaggatgaaccgcgaatatgccgagaagatctgtctgcagatcttcgatgctttggacgcaatgtacgaggctgaaaggaacatcgcagggcttggcaagcaggaacggattcgattcgatgattcggttcaggcgatcattgcggaccttgaggacaagcttctctttccgatttgcgagcagtatccggatttgcttccacccacggaggaacagaggccaagcatactttgcagcgaattaacatggagcgaggtgaatcttccgtcttcggtgaccgaagatcagcttgacgaagtcatcatgtcgcttttgaagccgcggtggcggaaggtcctgtggttcgtgaccattgcagaagaacgctacaaggaacttggctgggctatcagtcatgaagcgaccgccgcgcgcttgaaggtgctctccgatatggatcgtatcgaagggatcggcgatatgcggtactggggcaatagcgaggtccggttgaaggactgagtgcggttagtgtccgcccagcaggctgatcacgaaccgtccgccgacgatgaagagataggccccgaacgccacctcgagcgcgcgcttcgacagcgcgtgcgcgaccttgacgccgagcggcgcggtgacgagcgtggtcggcatcaccaagagcgcaccgatcagcgagacgtagccgagcgcgaacggcagttgcagcgcggcgacgtcgggaaagcgcgcggcggcgggccagccggcatagacgtaaccgagcgcgccggggatcgagatcagcaccgcgagcgcggacgatgtcgcgaccgcctggtggatcggccggccatagaacgtcatcagcagattggcgaacaggccgccgccgatgcccatcagcgtcgacagcaggccgacgaagaaaccatagacgcgcatcagaaaacccttcggcacgtcgtcgccgaacttccaggtctcgcgcgccaacagcagccgcgccgccgccgaccaggccaccatcacgaacacgatcttgaacagccgctccggcgcgaagcgcgcggtgacgctgccggcggcgacgccgatcatgatcggcagccaccagcgcttcaggatctccatgtccaccgcgccgcggcgataatgggcgcgaaacgagctcagcgaggttggaatgatgatggcgagtgaggtgccgatgcacagcggcatccgtacctcgagcgggacgccggcaaggcgaaagcattcgtagaacaccggcaccaggatcgcgccgccgccgatgccgaacaggccggcgagaaagccggacaacgcgccgaccgcgatcagcagcagtgcgagttcgagtagttctcttggatcgaggccggccatcatctttttcttgcgcatcaggctgcgtgttgccggagcaggtgcttcggcggcgtctcgcgacggtccatcgcgagcaatagccgcttttcagattcaggagtatcagcgccgccacgcgggtgctcatgcggaatctcgggtggcgccttgtcgaacggcatcagggcgaatcgcaacttccgcatatccggtcggctctgggtgaatggccccgacgctctgattggtgcggtgcggtatgacgctggcatcgtgcacgtggcggttcggcgcatgcagtcctgcggtcgccagcgcaaacttgcagcgcctcttatccggccgcgaatggcgccgaaacaggcgggtcagatgcctcagccgtcatggcttcgatcacctaagatcagggcatttgtcgattatccggcggaacaatggggcaggatcgacgccttccggaccccgtcaacggtcagctgagcgggctccttaggatgttcgaacagagattcacttctttgttcacctcgccttgcatttagtataccacgctgcggatcaaccagaattcggcaagtctaacaatgaacttcggttcgagcgaaggctaattggccgttgcgcggggtgatcctagtccgtaaatagaactcctctaccgcgttccccgatgggccggccgcggtccctcgcaacataaagcccgccgatgaccgccaggatcgaacgaccgctttcaccccatttgcagacctaccggtggacgctgacgatggcgctgtccatcgttcaccgtgccacaggtgtggcactctatttcggcaccctgctgctcgcctggtggctgatcgccgccgcctccggcccgactgcctacgccaacgttcaggccttcaccggcagcgcgatcggcaagctgatcgtgttcggatacacatgggcgctgatgcaccatctgtgcagcggcatccggcatttcgtctgggacctcggctacggcttcaaggccaatgagcgcgaagccctcacctggggcgcgctggtcgccggcatctcgctgaccgtgctggtctggatcgttgcctacgcggttggaggtggacgatgagcggcccttcctcgatgcgcacgccgctggaacgcgtccgcggccttggctccgcgcataccggcacctccgatttctggcgtcaacgcctcaccgcagttgcgatgacgctgctgatcgtccccgtgatcgtcgtggtgatcatgctgatcggccgcaaccatgccggcgcagcgcagatcctcggctcgatcccgatcgccatcatcctgctgctcttcatcgtcgccagcacctggcacatgaagatcggcatgcaggtcgtgatcgaagactacatccacaatgagaagctgaagatcgccagcgtgatggcgaacaacttcttctgcgtcgcggtcgcattggcctcgatctacgcaatcctcaaattgtcgtcgggagtttgacccatggccggtgaaggaaacggcaaggccaccaatggcggcccggccaccaacggcaaggcctatccgatccaggaccacacctacgacgtcgtcgtggtcggcgccggcggcgcgggcctgcgcgccgtggtcggctgctcggaagcgggcctgcgcaccgcctgcatcaccaaggtgttcccgacccgctcgcacaccgttgcggcgcagggcggcatctcggcctcgctcggcaacatgcacccggacgattggcgctggcacatgtacgacaccgtgaaggggtcggactggctcggcgaccaggacgccatcgaatacatggtgcgcaacgcgcccgacgcggtctatgagctcgagcattggggtgttccgttctcgcgcaccgaggacggcaagatctaccagcgcccgttcggcggcatgaccatggattacggcaagggccaggcgcagcgcacctgcgccgccgccgaccgcaccggccacgccatgctgcacacgatgtacggccagtcgctgcgccacgcggccgagttcttcatcgaattcttcgccatcgacctgatcatggacgaccagggcgtctgtcgcggcgtgatcgcgctcaagctcgacgacggcacgctgcatcgcttccgcgcccagaccacgatcctggcgaccggcggctacggccgcgcttacgcttcctgcacctcggcgcacacctgcaccggcgacggcggcggcatggtgcttcgcgccggcctgccgttgcaggacatggagttcgtccagttccatccgaccggcatctacggctcgggctgcctggtcaccgagggcgcccgcggcgaaggcggctatctcgtcaattccgaaggcgagcgcttcatggagcgctacgcgccgtcggccaaggacctcgcctcgcgcgacgtcgtctcgcgcgcgatgacgatcgagatccgcgaaggccgcggcgtcggcaagaagaaggatcacatcttcctgcacctcgaccacctcgatccgaaggtgctgcacgagcggctgccgggcatctcggaatcggcgaagatcttcgccaatgtcgacgtcacccgcgagccgatcccgatcgtgcccaccgtgcactacaacatgggcggcatcgccacgaactatcacgccgaggtgctgaccaagcgcaacggcgacgacaattcggtggtgccgggcctgatggcgatcggcgaagcggcctgcgtctcggtccacggcgccaaccgcctcggctccaactcgctgatcgacctcgtggtgttcggccgcgccgccgccctgcggctcgccgacaagctgactgcgaacgccaagcagccggagctgccgcaggattcggccgaccgcgcactcggccggctcgatcacttccgccacgcctccggcggcacgccgacggcgaagctgcgcgacagcatgcagcatgtgatgcagaacaattgcgcggtgttccgcaccggcgacgtgctgcaggaaggccagaacctgatccacaaggtctatggcggcgtcagcgacatctcggtctccgaccgttcgctggtgtggaattccgacctgatcgaaacgctggaattcgacaatctgatcgtgcaggcggtcgtgacgatggattcggcggccaaccgcaccgaaagccgtggcgcgcatgcgcgcgaggatttcccggaccgcaacgacaaggactggatgaagcacacgctgacctggatcgatccggccggcaagaccgcgatcgagtaccgtccggtgcacagctacacgatgaccaatgacgtgcagtacatcccgccgaaggcgcgggtctactgagaacgaaggcgagcaagcatggttgaattcgcacttccgaagaattcgaagatttccggcggcaagacctggccgaagccggccggcgccaccgagacccgcgaattccgggtgtatcgctggaacccggacgacggcaagaatccgagcgtcgacacctattatgtcgacaccaatgattgcggcccgatggtgctggacggtctgatctggatcaagaaccacatcgatcctacgctgaccttccgccgctcctgccgtgaaggcgtctgcggctcctgcgcgatgaacatcgacggccagaacacgctggcctgcaccaagtcgatgcacgatgtcggcgccggaggcgcggtgaaggtcaatccgctgccgcaccagccggtggtcaaggacctggtccccgacctcaccaatttctacgcccagtatgcctcgatcgagccgtggctaaagaccacgacgccgacgccgcagaaggagtggaggcagagccacgaggaccgcgaaaagctcgacggtctctacgagtgcatcctgtgcgcctgctgctcgacctcctgcccgagctactggtggaacagcgaacgcttcctcggccccgccgcgctgctgcaggcgacgcgctgggtcaccgattcccgcgacgaagcgaccggcgagcggctcgacaatctcgaggatccgttccgtctctatcgctgccacaccatcatgaactgcgccaaggcgtgcccgaagggtctcaacccctcggaagcgatcgccgaactcaagttcaagatggtcgaacgccagatctgatttgaggccgccggcgctggcggcttcttcttcatagcatgctctcaagcgctgaacgacgtcggcatcgatatccgacgtcgggccgccgtacggcacgtgcgaagcagcgggccgcaccgtttctcttgtgagcaaccacgccggtggtcgagcgaggcctcacctgatccccgtggcgcggtcgccggcatcaggaaccgtcgtcaattgccgcaagcggagcacggaactcaaccaccaggccggacggctcatagcgctttcttgagcggcttccgccgataatgcccatgtcgatgaggcgagaaccaagtccgatcttggtcggcgcgacaaccggcggtccgtcgtgctcggtccatttgacgatgagacaatccggttcgatctcccatgatagccgcacatagccggtagagaccgagagggcaccatgcttgattgcattggtcgccagttcatggagcacgagagacgttgacagcgcagccttcgccgtcagccgcaagcgggggccatcgaggtgaaaccgagatgccgcgccgtgcaagcccagtacgttcgcggccagttggcgtagatcagcagccgaccagctatgctggagcaagacgtcatgcgcacgtccaagcgcatcgatccgccgttcgaaagcttcaactgcttcgtggtcggatgcgttgcggagagtctgtctcgcgatggcctgcaccaacgccaaggtgttcttgaggcgatggccaagttcgtcgttgagaattctttgccgctcctcgatgttcttgcgttcggtgatgtcgcaaactgttccgagcacgcggatggtgacgccattcgcgttgcggaccagcatcgcgctgcgagatatccaggccacgtcgccggtctgaggcttgcggacgcgatactccgtgtacaacgccatctcgccgctctcgcggctgccccggtcggagatcagatgctcgtcgccgggatggatcagacgctcgatgtccggcgcattcacggtaggcatgatcggcaatccaaagataaggcaaaactgatccgtcaccgtgagccggtcggtcgcgatatcaagctcaaaacttccaattcgcccggccgcctgagccatgcgcaatcgcgtctcgctggccctcaacagagcagctaaccgttcgctctccagcgcacgcgcagtcgaggccgccgccgcatcacgctcttcgagagcggcatgttctgccttgatcatcgtacgccgatactcgagctgcgtcatgacttgccgagcgagggcttcgagagagaatgtctgctgctccgtcagcccccctggacgaggcacggtgtcgataacgcaaagcgtgccgatcgcgatccccgaccgggtcttcagcagagctccggcatagaagcgaataaacggcgcgccggtgaccaaggtattggtccgagtgcgaggatccagggacaggtctggaatgatcaacgtatccgcctgccgcaacgcatgagcacacaccgattgctcgattggcgtctcgcggagatcgagccctgccgctgccttgaaccattgtcgcttcgaagcgaccaggctcaccaaggcgatgggagtgttgcatatctggcgagccagcaagacggcatcatcgaacccgacctccggcgaggtgtcgaggatgtcgtagccgtcgagcgcttcgagccgctgcgactccgtgatgggcgagagaaacactgacatgcctcgtcggcgcaaaatctggattgatggcaaaaccgagaacgaggcttttgccaccaaaaggcgcgccgtgttgacgtcaagggctagtttcagacgtcccgtcgcaaagcggccgcaggcataagactgggccgtgcggtaacccttggccagcaagccgctgagcgccctcaggccgtcgattgctcgagacctgagggcgcacccgagatcaataggcgcggcggctcgagatcatgccccaaaagaacaggacgatgatagcgccgacgaccgagccgatcagacctgctccctggccggggccgtaccagccgagcgcctgacccagatagtttgcgaccaccgcgccgacgatgccgaggatcgtggtcatgatgaagccgctcggctcgttgggacccggcatgatgaatttggcgatcaagccggcaatgaagccgatgatgatggtccagatgatacccataatgtctgttctctccaaattagccgcgaacgatcatcgtccacggacggtcggtttgtccgctgcggcagtgcgcaagcggtgtcaccgctttgcccatgcatcagaggtatcgtttcgcgatcgtgcgccaccgaagcggccggcaagcgcggcggcgagtgcgccgagcacaagtgcaaagaatgcaactagcgcaccgcgcgaagcgacccgggcggcagtttcggctgcttgtgcggccttggctttggcgtctgcaacagactgctcatatttgcgctgatagtcctgcaccttcgccttggcctcgtcggacgagataccctgcgcctgcgccagagcctgcgcggcctgctcgaccgcctgctcctgctgggccttgtcaccgatcagagcggcacgcacggcgttcaccgcggtgtcgcgaagctgggccggatcctgaccaccggtcgatgcccggatctgtcgctcgatgtccggaaacaagctatcaactgaattcggcaccgaggcactcgcggtttgcatggcaccaccgaccatgtgcgcggtaccgccgagcacattgttcattgcgccaaatacaccaccgagcaggcccccgatcgcggagctaagcaggcagatcatcacgagtgtcgcagcggcccatgaaatcagaccatgatagcctgcctttgcggccatcgcgctgctgcacatgcggcccgcgatgtagccacccgcgcaggatgccagcaacccagaaccgatccaccagatcgccgctgcgagtgacagcgaaccggcatcagctccaccggtcgaagctgaggtgagactggcaagcccgatcccgactcccagaaccgaaagcgtgagttgcgtaaccagagcggccgcgacgcctgccaggacagcgccccaggagatcgtggacgaagcccaagccaggcgagcgtttgagtcgaccgcccgggccgggccgccgtcataatatatcgtcatgataccccccggtcagcgacggctgatcagaatgccggcgagaaagcccaccgtgcccgcaatcagtaccgacgccaatggataacttccgacagcctcgccaacatcccgagagccgcgccgcgcatagcgacgaccttcgtcgtacatctggcctgcgagatcaccggcatcgcgcaaaccgtccttggcctggccgtaaaggttctgtcccttgccctcgatctgacgcgcaacgccttccgcgcggatatcctgattgccggttacatgtccggcggcttcttccagtttcccaccgaactccttcgctgctcccttgatgcggtccgtatccatcgtcatcactcctgttgtctaacctgaattgctggaacaccacgacgagcacaggcaacgcgggctcttcacttcttgagcaaatcgcgggcagcatcctttgccttgccgacctgagcctgcgctttgccggccagttgctcggccttaccttcgaccgtcagcttgtcgttgccggtcaccttgccgaccgcttccttgatggaacccttgatctgttcggcggtgcctttgatgcgattcttgtccataatgaagccttctccgttgagttgtcgcgagtgaactcgttcatcgcggagtaggtggggaacacggcttcaagcacaatgaactgattgcaccagttcggtggtgaatccgtactagcatctctattttctggcgatgtagccgttctcgcgtccccagatcacggcgtcagtccgacggtgaacgccgagctttcgatagagcgacgccacgtgattgcgcaccgtattgggcgaacgccgaagccgcttgccaatcgcagcgtcgctgaggccttgggagatcagcaccagcacctcgcgttcgcgcgccgacagctgctccgccggcttagaatcttccgatctgcctggccgacggaaagcagcgagcttctccagaatgcccttgctaagccatgaggcatcggtcatgacggcctcgatcgcctgcacaagctcgcgctcggagcgcttccggtccgtgatatccagaaacgtggcgagtgcgcagatctggtcgcctattgtcacagtctcggcagagacgacacaatcgagttcgttgccgttcttgctggcaagacaggcctccaacttggaaacgtgaccggattgctcaatctcacgttcgaactgactttgagcttctggccgtgcccaaagccgcatttcaccgaggcttcgaccaatcagttcggcgctggtgtgcccgaactgagcgacaaatgcttcgttgaccatgaggaacgtatggccatccatcctcagcagcgccgtcggcaccggggagagctgaaacgacttggcaaaccgctcttcactctggcgcaacgcggactcggccttggcacgcgcatccaggtcggcgaacgtaaagagcatacaagcgtcgtcgccgatttcgattggctggccggccagaatcacgagtttcgatccacccgagcgcagcggaagctgcacctccgtttgtggaatcgtcctgccctcggcgaggcgctcctgaatcgtctcggctttctcgaccccgttcagtaggccgacctccgcgagcgagcggccgaaaacgtcgtcgcgcgcataccccaacatatccaggaaaccctggttgaccttgacgaggatttggtccgccagccgacagatgaaggccggggcaggattggcgttgaaggtacgctcgaagcgggcctctgcggcatagcgctcggtcacatcggcgatcaccagcaccaggcaatcggggtttcccttggtgtcagtaatgacgagacttcgtatctgatgcacccactccgtatcgttgctggcccgaggggcgacggcgacgacaacatcgacaaatgtctctcctgcgacaacccgttcggcaggatatttgcgtttgccaagcaggtgattgttgcggtaccgcagcacgaagttcttgcggtactcgtcgacggacgtcccgagctgggcgagctcttccacaccatgcatcttcagggcggattcgttcgcccaggtaatggtctggtccggctcgataaggatcacgccttcactcaggccggcaatgattttctgaagctgcgaacgatcgatcgtatgcgtcaagatccgttctcgacagtatggttgaacgacggaccgacaatcacgacgcttcacagcgaaccaagcatgcccgcaagctcaccccgtgtcgccttccggcggaaacccttggaccgctaagcgttgcgacaaccctctccaagacggtcccaggaatcgacttttgcaacaggagtcccggaccgtttgttggacatcgataggccttgaggcgtgatgtggggaagacattcgatcccgttacaatctcgttcggtcgttttggttccaccctgcccgaagggcctcaatccctccgaagcgatcgccgagctcaagttcaagatggtcgaacgccagatctgattgccggcgcccggccgcagcggaagctgcggccgcatttgcctcgcgcggcagccgacctcaccacgtgatcaacggagcacgatgcagccacgcatcgttgccgacctgatcgaggacgaagctcgcgacgtcggtgcgggcgatcgttccgccatggaagccggataggtccgtgagcgcgcgcaccggctgtccgcccggcttgttgctgagaacggacggacggaccagcacccagtccaggccgctatccctgacgatcgcctcctggcgattcttgttcgcgtacaccttgcggagcagcagcgggtagatgacgttgtcgaacacgaatccgccatgtcccctgctgtcgccggcgcccatgccggtgatgcagacgagtcgcgagacccgttcggccttcatcgcggcgacgagcgcgcgcgtcgcggtcgagagcaacgtgacttcgcggaacggactcgccggagtaccgagcgcgctgatcacggcgtcctggcctttcagggcctgacgcagggctcgctcgtcgcgggcatcgccggcgacgattttgacgccttcaagattgcccgccttctcgggcgagcgagcaaggacggtgacgtcgtgtccgcgcgccagggcttgcgcgacgatcgcgcggcccgtgccgccggtcccgccgagaaccagtatccgcgccgctgccggtcgggtggcgctgccttgagaattgctcatgagagtctccttgaatgaagcgggaggcctcgtcaggagaccgtcccatcgttgctgtttccggtgatgttcagagcttgtcctccgcgagcagttcgcggatgcgcttcagcgtggacagcagtgccgccttgtagcccttgtcgctgtcgaactgcctctgctcggcctgctcttcggagccattcggctgcttgccgcgcaagccggtgtagcaatagaacttcaattgcagcgcaccggcatcgtcgacgaagagttcgttgacgatggcaccttcgcgcggaccaatggcctggaagaaggtcactttgttctccggctcgaaggtaatgatctcgcggagatcgtcgcctgcgatggcggcttcgcgcacgatgtgcgtcgcgctctcctccacgacttcgcagcgggtgcagagattcggcggcaggaactgcctggcatcgcgggccttgagaacgagacccttccaggcttgcgcgcgggtcagcggtctttcgccttccggattcaccgggacggtggcggtcgagtagatcatggtcgtattccgtggtctgcgggttcgggtgggaccgctgcgctcaggcagcggccgtgatctcggcgacgaagtcgcggtaggtgcgcagcggacggccgagcaaggtggtcaggcgctcgacgtcgccggcaccggggagcattccgtcggtgaggaagcgctcgcccatcagccgcatgtcgaatgccatccagctcggcatgaactgccggaggttcttctcgaagccggcggtgtcggcaccgggataggcgatcgtgcggcccaacacctccgaccagacggcagcggccttggcgccggtcagcgtatccggaccgaccagattgatccggaccagcggcagcggcgtcgcggaggtttcgcggcggacgagttcgatggcggcgatctcgccgatgtcgcgcgcgtcgatcatggcgagacccttgtcgccgatcggcatcggatagatgccgtagccagccaccacgtccttgatcgtgtgctcgttgttcatgaagtaggcgggacgcaggatggtggccgcaaagcccatcgcctcgatcatccgctcgacgccgaacttgccggcgaagtgcggcacgttcacgtagacgtcgctgtggatcaccgagagatagaccagccgttcgacgccagcctcgcgcgccaggttgagcgcgatcagcgcctgggtgaattcgtcgggcaccacggcgttgagcaggaacagggtcgagacaccggagaatgcgctgcgcagcgaatcgacatccagcagatcgcccttcacggcggtcacgcctgccgggaagtcgaccttcgccggatcacggacgagggcgcggacctcggcgccgcgcttgacgagctgttcgacgacgttgcggccgacggtgccggtggcaccggtaacgaggatggtcattgggatcactccgttttgggatggttggtagacatcccgaaactagtgatccactgatggatcgatagatgttatatttagacagcgtgtcccattggtggaacatatggatctacttgccctcgccgatttcaacctggtcgcccgccatggcgggttcggccgcgccgcccgggcgtccggccgccctaaggccacgctctcccgccgggtttccgagctggagagcggcctcgacttgcgcctgttcgagcgcggcgcccgcacgctgaaactcacccaggagggacgtgcgctttacgaacggaccggcgcgctgctcgcggagctcgacgagacggccgctgcgatctcatccggagccgacaagccgcgtggcagactgcggatcagcgcgcctctcctgttctcgcagaccgcgatggggaaactcgccgccgcattcgcgctgaaatatccggaggtccggctcgaggtcacgaccgaggaccgttcggttgacatgatcgaggaaggctacgacctggtgatcagggtcaacccggatcctgacgagacgctggtcggtcgggtcctgatgcgcgaccgacttgtggtggtggcgaacccgaccctgcctcgtccgaagggcgataatgccgcaccgaccgtggtgcgtggcgcgagcgatcaaggctccgactgggacatgacggcgcagggccggaccgatcggatcaagaccgatccggtgctgcgcctgtcctcgctcatcatgatccgcgacgcggttcgcgcaggcgtcggggccgcgcgacttcccatttcgcttgtgagccgcgatctggcagccggcaagctcgtccattggggcgatgtcgacggacccgacatcgttctctgggcgctctatccgtcgcggagattgctcagcgcgcgcgtagccgcctttctcgattgtctcaaggaagcgtttccctccgggacccccgaggaacttgcatcattcatcgactgagcggcggcaggttcaaccaccagccgcccccggccggatcaggatatcggcgccgaccgcatcgatgcccggcttgcggaggtcgagcacgacgtcgacgatgctgtgatcctccggatccatcgccacggtgaagccgagatcgcggcacatcccgatcatcgtggtgttctcggtcagcacctggccggacaggcgcttcaacccttccgaccgcgcatagtggatcaggagctgcatcagcgcccagccgagccctttgcccttgagatcggactgcagcaggatcgcgtattcggcgttctcgtacagcgagtccgaatgcagccggaccgcgcccatcatctcgccggtggttggatcgagcgccacgaatgccatcgcgcgcgcatagtcgagctgggtgagccgcgcgatgaaggcgtgcgagaattccttcatcgcatggaagaagcgcagcctgaggtcctcggcactcacgcgcttgaagaagccatcgaccatcggctcgtcctccggccgcatcgggcgcacggtgacgcgcgagccgtcacgtaacgcgagctcgccctcccattgcgacggatagggcctgaccgcgagccgcgtgtggccggcgaacagccgcgtgggcttgcggatcgcgacccgcgcatcgagcgcgagcacgccggtctcgtccgccagcatcggattgatatcgagcccggcgacctcgggaatgtcggcggccatctgcgcgagcttgaccaaagtgagcggtaccacatcggccgggaccgccgggatatcgccatagccgccgagcagccgcgagacgcgggtccgtccgaccagctcacgggcgagattcatgtcgagcggcggcagcgccagcgccttgtcgttgatcacctcgaccgcgggaccgccgcggccgaacacgatcaccggaccgaaggtcggatcgtcggcgataccgaggatcagttcgcgcgccgcgcgccgcacgatcatcggctggatcgtcacacctcgcaggatggcgtccggccgtgcgcttcgtgcgcggtccatgaccgtcctggcggcctcgatgacgctgtctttggtccgcaaatcgagaatcacgccgccgacatcggatgcgtgcctgatgtcacgcgagaacaccctgaccacgatcgcatgcccctcggccaggaacggcgccgccttctcggcagcgtcctcggcactgtcggcgacgagcgtcgttacgatcggaatgcgataggcctcgaacagggcgacgatctcggccgggtcgagccatgcccgtccctcggacaacgcgttcacgaccacgtgccgtgccgccgccgtctccggcgtgaacaccgacgcgacgcccggcggggtcgcggcgagcgcggtggaggcctcgcgatagcgcaccagatacatgaaggcgcgcaccgcatcgtcctcggtcgggaaatgtggaatccgcgccgcctcgaagatcgcgccggtgcgctcgtcggcgccgacccatgccgcgagcaccagggcggcgaccgcgctgcgcttcgacctgcgctcacgcacgcattgcgccaccgcctcggcgatgccctcggccggcgccaccgcggtttccacgttcgcgaccagcaccgcatcgcaattggcgtcatcgagcagcgcgttgagcgccaccacgtagcgggcggcatcggcatcgccggcgatgtcgacgggattggcgcatgaccagcccgacggcagcatcctgtcgagccgctcgatggtctccgccgtcaaggtcgcgggaacgccgccgagctcggccagccggtcggtcgcgaggatgccgagcccgccgccattggtcaggatcgccagccggttgccgcgcggcacgaagccgcggccgagcagcttggcgcaatcgaacaactggcggaggtcgtagacgcgcagcatgccggcgcggcggaacgcggcgtcatagaccgcgtcggagccggccagcgccccggtatgggtcgcagcggcgattgcaccctgcgccatccggccggacttgacgatgatgaccggcttcagccgcgccgcggcgcgcgccgccgacatgaacttgcgcgcatccttgaccgcctcgaggtagatcaggatcgcgctggtgtggtcgtcgagcgcgaaataatccaagaggtcggcgacgtcgacgtcgagctggtcgccgatcgaggcaatgccggagaagccgagccgccgctccgccgcccactcgatcatcgccgatgcgaccgcgccggactgcgagatcaacgcgacatgtccgtcggacggctggtgcgaggcgaaactcgcattgagcttggcgcgcggcaccatgacgccgaggcagttcggcccgaacaggcgcatgccgtgccgccgcgcggtctgccccgcgatctccgcaagcgaacccgcgccgtagccgagaccagccgacaggatcgccgcgccggcaacgccggccaagcccgcctccgccacgatctccggaaccgccgccgccggcgcgctgataacgacaagatccggaacgaatggcagcgatttcaggtccggaacggtcggcacgccgtcgacatcggcatactgccggttgacgacgccgaccttgccggcaaagccgctcgctttgatgtttcgcagcaccgccgctccgagcgacgacggccgcgggctgccgccgaccaccgcgatgcttcgaggcgaaaagagccgctccaggccgtaggtcgacattgcgtgatctcgcagggaacccgtggacgcgcgtgaggcgcccccggatgaactctacttcgtcgctcggcctgttgcacgcatcgctgccgcaacggccccttcaatgaaggccgagcgcctgcgccaggttgaaggtcaggaagctcgcggcataggccagcgtgagcatgtagatgaacgtcaccaccatccacttcgcgccgccggtctcgcggcggattaccgccaatgtcgaggcgcattgcggggcgaagatgtaccagaccagcagcgacagcgcggtcgccaacgtccatttctgcgccagcacctggccgatctggtcggcggcttccttgccgccctcgatcgaatagacggtgccgagcgcggcgaccgcgacctcgcgcgccgccatgcccgggatcagcgccaccgcgatctgccagttgaagccgatcggccgcagcagcggctcgagcgcatgaccgatcatcgcggcgaagctgtagttgatcgccggcccctcggcgccggtgggcgcctgcgggaacgaggccaggaaccagatcagcaccatcatcgagaggatcgtggtgccggcgcgatacaggaacatcttggcgcggttgaacacgccgatcgcgatgctgcgcagccgcggcatcttgtagtcgggcaactccagcatgaacggcgccggcgcatggtcgcgccacaggaagaatttcgcgaccgccgagaccgtcagcgcgctggtgatgccggcggcatagaggccgaacatcacgagcccctgcagattgacgaacccccagagcgtggtcgccggaacgaaggccgagatgatcagcgtgtagaccggaattcgcgccgaacaggtcatcagcggcgcgatcaggatcgtggtcaggcggtcgcggcggttgtcgatcacccgcgtcgccatgatgccgggaatggcgcaggcgaagctcgacagcagcggaatgaaggcccggccatgcagcccggcgccgcccatgatgcggtccatcaggaacgcggcgcgcgccatatagccgaaatcttccagcagcaggatgaacaggaagatgatgatgatctgcggcaggaacacgatgacgctgccgacgcccgagatcaggccgttctgcaggaagctctgcaacaggccccagctcgcgggcagcaggtcgtggatcagttgcccgagcgcggcaaagccgtccgacagcagctccatcgccggctgcgcccaggtgaacaccgcctggaacatcacgaacaggatcacggccaggatcacgagaccccagaccggatgcagcacgaccgaatcgatccggttggtcagcgtgtcgggcttggtcggcagcgtcaccgccgcggcaatgatgcggtcggcctcgcgctgggcggccttgagatcggcgatcgtcggcgtcgtccattcgctggccgcggcctggtgcgacgttgccaggaattcgtcggtccgcttcaggagctcgtcgacgccgcccttgcggaccgcgacggcggtcacgatcggcaggccgagctcctgcgacatgcgatcgagatcgatcgtcacgccgcggcgcttcgcaatgtcgatcatgttgagcacgagcatcatcggccggccgacacgcttcaattcgagcaccaggcgcaaggtcagccgcagattggtggcgtccgcgacgcagagcacgagatcgggcaccgcctcgccgtcgaaacgaccgagcacgatgtcgcgggtgatctcttcgtccgggctgcggccgcgcagcgaataggtgccgggcaagtcgagcaccgtcacgctgcggccctccggcgtgacgaagccgccggatttgcgctcgaccgtgacgccgggataattggcgactttctgggtgctgccggtcagccggttgaacagcgaggtcttgccggtgttcggcgcaccgaccagcgccagtcgcagggatgcagtggtcattcgacgatcacagccatggcttcgctccggcgcagcgcgatcgtgatgttgtcgacgcgtaccgcgatcggatcccgccggatcgtgccctcatgcaggatttccacgcgcgcgccctcgacaaatcccatctccaccaggcgctgctccagctcctgcggagagagcgatgaacccgtcacgagcgcatcgagcctgatgatctttccgacaaaaccgcgatccgcatgtccgagccgggtgtcctgaacattaacctgggaagtgcctggatcgcctgtcatgcggcctgtttttcagcaggtagtcgcagggtcaagcatttgcccgtgagaggttttagaactcctaaaaacagcccctgcgatcgtcatcccggccggatttccgcttgaccgccgcgctccagctaacgaggtcgtgatccctccgggcggcggcctcggggccggcacgcgggccaacggacattcggctcccacgcgggcgggatcgccgtccgcgccgggcccgaatatcaaccggcggccggccgatcgcccctaaccgcctttcgctgcccgcggacgttggatgagcctccggggcggggatttgcttcctccggcacaatggtttgcgttaagctccgcaaggagccggagcgcccgtgccgaccgcacaacgcaattcgctgatactgctgcgatggatgatggccgcctcgctggcccttccgctggcgctgttcctgttcgcttcggcgatgtcccgggtttcaaacagcgacgccgccgaccaggaaatccagcggaccctcgacgtcacccatgaacacgcgctcaaggtgttcgagaccatcgaccgcagcctgggcgagatcaccgaggtcgtccgcgggatgagcgacgccgacatcgccgcgcgcgagaagagcctgcacgagcggctgcgccaggtcgccgatacgcttccccaggtgaaatcgatctgggtgttcgatgccagcggccatgccctggtcaacagcctggtcgagccggcccccgacgtcgatttctcggatcgggactacttccggatccatgccgagcgcgacatcggcacctttatcggcgaggtgctgaccccgcggccgccctatcagggcgcgcggttcttcagcgtcggccggcgccgcagcaacgcggatggcagctttgccggcgtgatccaggcttcggtgcttccggagtatttcgagaacttctatgcgcggatcggccgggagcccggcagcttcctggctctgatccggaccgatggcgcggtgctggcgcatttccccgtcgtcgaccacgacgtcagattcgagccgagcgggccgctcggacagcagatggccgccaatccgctggccggcaccatgacgatccgctcccccgtcgacggtatcgagcggcgcatgcgctatgagcggctgtccgaatacccgatctatgtcagcgccggtctcgaaacctcggcgatccgggcgcgctggatcaacaccatggcccagcacctgatcttcggcatcccggccaccgcgctgctgttcggcctgctggcgctggcctaccagcgaaccgagcggctggaggaggaggccaaccggcggatcgaggccgaggatgcgctgcggcacggccagcggctcgaagcgctcgggcaactcaccggcggcgtcgcgcacgacttcaacaatctgctcaccgtgatccgcgcatcggtcgacatgttgcggcggccggacctgccggagccgcgacggcagcgctacatcgatgcgatctccaacacggtgaaccgcgccgccaagctgaccaaccagctgctggcgttcgcgcgccggcagaccctcaagcccgaagtgttcgacgcctgccagaacgtccgcaccctgagcgagatgatcgccaccctgatcggttcgcgcatcgagatcacggcgcaggtgcccgataagacctgcctcgtcaacgccgatgccggccagttcgagaccgccatcatcaatatggcggtgaatgcgcgcgacgcgatggatggcgtcggccggctcacgatcgcggtccgcgccgtggacgatctgccgcccgggacgagcatgccgccgagtccgcacggctatgtcgcggtgtcggtggccgataccggcgtcggaattccgcaggagctgttcggccggatcttcgagccgttttacaccaccaaggaggtcggtcacggcaccggtctcggcctgtcgcaggtgttcggcttcgccaagcaatccggcggcgaggtcaccgtcagcagcgagatcggcaagggctcgacattcacgctgtatctgccgcgcgtggtcggcaggcacaacgcgcaatcgccgctcaccgaggatgcgcctccggtcgatccgaccaatgcgtcggtcctgatcgtcgaggacaacgccgaggtcggaaagttcgccgccgacacgctgacccagctcggttgcacctgtgttttggtggagaacgccacccacgcgctggaagagctggccgtcgaccccggcaggttcgacctcgtgttcaccgatgtcgtgatgccgggcatgagcggcatcgaacttgcggaggagattcgccggcagcggctcgatctgccgatcgtgctcgcctccggctacagccaggtgttgtcgcagcagggcagcggcggcttcgagctgctgcagaagccctattcggccgagcaactggcacgcgtgctacacaaggccgcgcgctcgcgccggctacggcgggatcaggcgccggcggggtgaagtgaatcgcgtgcgcgtgccacacattcgctgtcgtcctggcaaacccatagccaccggcttcggtcgtgggagagaccatcggcggctagagcagcccccggattgcgcttcacttcatccgggccacatcttcacttccacttttcaaggaagggtgaaacgaaaacgcggacagagattcgccgcaacaagggaggctcgcgatgatcgaccatatcggcttttcggtctctgactacgaacgcgcgaaggcgttctaccaggcggcgctggcgccgcttgattacggcctgatcatggaagtgcccgcggaagtaaccgggcacgcgccgacggcaggcttcggcgccaacggcaagccggatttctggatcggcggcgaaggcgcgatgaacaagccggtgcatatcgccatcaccgccaaggaccgcgccaccgtcgacgccttttacaagaccgcgatggcggccggcggccgcgacaacggcgcgccgggcattcgcgcgcattatcacccgacctattacggggccttcgtgctcgatcccgacggccacaacatcgaggcggtctgccacacgcccgaatagcggccggacgaattggccgggcaacgccgaatcaacagcgcgcgggccgtccggaccatcctgcatgcgacctgcgacagatcgacccgcccggcgatcgatcacgcgcgcgcctcagttccacatcgattgcgagtgtgtcgaagcgtttcttctgaatgtctagtgaacaaagccacatgcaacccgttataatgtcgaaataaacttcgccgatgattcggcactcgccacaatccggcctaacggctggcaattcatcgtcctgccgaattgttcggttctgactttccttcctgcccagactttccgccggggactccaagatcatgacaaagcttcgtctcgtgctgcttgccacgactgcgctgacggtgatgcagttcgccacctcagcgtcgcacgcacaaaattcgccgctggtcgtcgcacaggcgcagcagaaggaagaactcggaccagacggaaagccgaagccgcacccggcgcccggcgctcctgcacatccggcaccgccggccgcagcgccacatccgcaagcgccaccgccagctgccgcgccacccgcgcatccggctccgccgccggccgcagcacctgcacggccgga

SEQ ID NO: 27 - DNA, 119268 bp, Bradyrhizobium enterica
gccggcgtgcatgaccacggctccgctgatcgaattccaggagcggcgggtgaaggattacccgcaccagctttccggcggcatgcgccagcgcgtcatgatcgccatcgcccttgcctgcgatccggatcttctgatcgccgacgagccgaccaccgcactcgacgtgacggtgcaggccgagatcatcgagctgatgcgcaatctgtgcgccgagcggggcaccgcgatcctgatgatcagccatgatctcggcctggtcgccaatgtctgccgccgcgtcggcgtgatgtatgccggtcgcattgtcgaggaacgccgctcggacgacatcttccgcgccggcgcgcatccctacacccaaggcctggtcgactcgctgccgcggctgggaagccgcgcggcacttggccgggcgcggctcagggaaatcgccggcgtcgtaccggcgatcgcggacttcccggccggttgccgcttcaatccgcgctgcgcgctggccaccgagatctgccggaccaccgtgcccgagacgacatggctggatgctggcgggctcgtcaggtgccaccatcatgcctgaacccacggcgaatcccggcgacgacgtcatcctcagcgttgaggatctcgcggttcattttccgcttggcggcggcctgctcggcagcggccggcggctgctgcgcgcggtcgacggcatcgatctcgagctcaagcgcggcgagtgcctcggtctcgtcggcgaatccggctgcggcaagtccaccgtcgccctttcgctgcttgggcttctgacaccgacgcgcggccggatcgtgctggacggccacgtcgtgacggaacagcaatcggtcgatcgaaagcgattggcccgtatcgcccagatggtgttccaggatccctacgcttcgctcaatccgcgccagacggttcgccgtacgcttgaagatccgctgcgcctgcacggcgtgacggcccaaagcgagatcgacgggcgcgttgccgagatgctcaggcatgtcggcctgcggcccgagcaggccggccgctacccgcatgaattctcgggcggtcagcgccagcgcatcggcatcgcccgcgcgctgatcctcaatccgaagatcgtcatctgcgacgaaccggtctcagcgctcgatgtctcgatccgtgcccagatcatcaacctgctgctggagctgaaggaaagcctcggcctgtcctacatcatgatcagccacgacctcggcgtggtcgagcacatgagcgacagggtcgcggtgatgtatctcggccgcatcgtggagacgggcggctggcgcgacatcttcgaacggccggcgcacccctatacgcaaaccctgatcgctgcgattcccgatccgctgcgccgcgcaccgttggcgacggcgaggggcgagcttcccaatccgcttgatccgccggacggatgcgcattcagtccgcgctgtcgttacgccgaaacagcgtgtcatcgcgaacccgggccttcgctcgagacgcgtccggacgggcacgcggtgcgatgttggcgggcggacgagattgccggtcggcttccaagctgaatggcgcgcccgagcctcgatttgcctgcgggacgcgttttccactaaggttgccggatggcgacgggcgggttgaagatcacgaccggcatcattgccgcggtactggtcactgcggcggtggctcaggcgcgcagcgtgctggccccgcttgcggccgccctgttcatcattgcgatcgtctggcccgttcagaagcggctacagtcgtggctgccgaaactcctcgcgcttgccatcaccgtcgtcgttacgaccactgcctgcgtcgcgtttgcctcgctcgcggcgtggggattcagccgtgtcgggcgctccctgattgcggatgcggtgcgatatcaagccttctacgacgccgcggtgatatggctggacggccacggcatctcgttcgcaggcctttgggcggagcatttcaatgtcggctggctgctgcgcgtcacgcaatacgtcaccggccgtgtcaacaccacgttgagtttctggctcatcgtgctggtctatgtcgtgctgggactcctcgaggtcgaagacgctggtcgacgcatccagcgactggagaatcgcacagccgcgcgcgtcttgctcgagggcagcaaggctacggccgccaagtttcgtaaatatatgctggtgcggacgcagatgagcgcggtcacgggtctcctggtcggcctgtttgccgccgtgaccggactgccattcgcgttcgaatggggcgtcatcgcctttgtcctcaactacattcctttcatcggccctttcatcgcgacactgttccccacgctgctggccatgacgcagttcgacagttggcccgcggtgtttggcgtattcgcctgtctcaacgtcatccagttcgtggtaggcagctatatcgaaccgcgggtggctggctcgacgttgtcgatctcgccattcctggtgctgtttgcgatcttcttctggagctcgctttggggcctgttcgggactttcatcggcgtgccaatcacgctcgccattctgaccttctgcgccgagagtccgtcggctgcatggatcgctgatttgttcggcggaacgcacgaagacaggccggaaacgtcctaaagcatgatccggaaaagtgcgaagcggctttccgaaaagatcatgctcaaacaaagagctaaaacgcgatgacgattcaaccaaatatcatcgcgctttagcttccggcaatttccacccgctcgggctcggcgaggcggagcttccggtccggcccgaccaccattctgtggatatagaaataagtgacggcgtcatcggccgcccccatcaccggcgacggggcagagacgatcttcgacgcaccgcatgtaccgatccaatcgatatgccggtgaccgtgcatcacgaccgagcgatcggagaacttttgcaacctgcgtacaaaccaactgccgttgatcagggccgtcccgatgcgttcggcaaacgtcttgaccggcatcggatactccatcaggtgatgatgcagcgcgataatccagcatgacgtcgggagatgacggattgcggcctccaatcgccgtgtttgggcttccgaaaccaaaccgagcgcgttggtgaaggaaaagtgggtttctgcgttggagttgagaatggcgatcccgaggccgccatcctggtccggcggcaggaccattgggaattggtcgtcgaacaagccgcggaccgccattgcacgtcgcacacctccgtgctgcgcaaattgcgttatccggtcctggtaaggttccagcgcctggttcagcgtagccgatggtttgccggaaccgtcgatgacgcgcacgcgatcgccctgaacggccgcaatcgccgacagggtgcgcatctgccgtagccgcttgcctgggctgaacggcaggtcgaggcgcgcgggattggcgcggtccacgacgttaacgtcatgattgcccggcagcatgatgatgcgtgctgcaagctcaggatgccccgccaatgcatcgagaaattccgcccattcgccggtccggccggcatccgtcatatcgccgctgatcagcacatggtcgagcggatcgacggcgtggatttccgcgaggcgagccagcacgcgatggaagcgtcggtttccccgcggaccggccgtcccgctttcgatgcggaagccgtatcgctcgccgaccacgtgaaggtcagacaaatgcgcgaggcgccagcagcggcctccgggcggcgtcccgtcgaaggcagcaaggtcggccggttgatccatgctggcgtcggccacactccaggccagtgatgcgactgcaagatagccggacaccagcaccacggcgttcgcgaacgtcggcactacaagacgatggatcagaacgaggtcattgacggtcgcagtccattgcgaagcaggccaggccaggaccgcgagcaatgccgcacctgcggagagcagcatgccggcgccgattgagcaaatgcggcgcagccttatgcgagaagcaggagttgcgccggttcgccagagcagttccgccagatggcccagcgcctcgcgcgtgaaggtgtagctcggttgcaccgcgagcgcattcaacgaccagaagtttgtttctgcgatttgaaacagcggtcgcccgccgagccaccctaacgccgcgatcacgaccaacgccagcactgcccccacttcggacaacgccagaacgtgttgcgaaaggctcgagatccaggcggacgcgaccagcggcgcaaggccgagcagcaggccgggaagcagaagggaaaccgtccaggcgaatagcagcttcgccgggcttatctcaaccagaaggctgcccacgatcgcgaacaacgaacgttgttcgggactggcggcattgtcctcaaagtcgccgtcgcggggatcaagcagcacgccgacgtccctccgttgcgcagcgcattctgacacaaacgcagctaacgcagcttcccgaaaaactcccgcacctcgccgacgaacagctcgggctgctcgaacgccgaaaaatgcccgcccttcggcatctcgctccagtgctggatgttggtgaagttggtctccatccatttgcggaccggcgtgacgatctccttgggaaacacggcaaccccggtcggcacactgaccttgtgcggggttcgcttgcccggcccaaagctttcccaatacagccgcgctgacgatgtcgccgtctcggtgacccagtacagcatcacgttgtcgagcagctcgtcgcggctgaggatgttttccggatgcccgtcgcaatcggtccaggcccagaacttctccaggatccatgccgcctgcccgctcggtgaatccgtcaggccatagccgagcgtctgcggccgggtggactgctgcttcgaatagccggaatcccagtcggcataatatttgatgccgttgagcgcacgtgtctcctccggcgtcggctgcccctcgacattgggccgcgtcgacatcgcaagcgtgatgtggatgccgccgcaatgcgccgcgtcctggccgccgatcgcggtcgtgaccgccgagccccaatcgcccccttgcgcgaaatagctggtgtagccgagccgctgcatcaggacggcccaggcgctggcgatccggtcgacgccccagcctgtctcagtaggcttggccgagaagccgaagcccggcaatgatgggcacaccacatggaacgcatccgcggcactgccgccatgcgccgttggatcggtcagcggttcgatcaccttgtgaaattcgaccaccgatcccggccaaccatgcgtgatgatcaggggccgcgcctccggatgcttcgagcgaacatggatgaaatggatgtcgagcccgtcgatctcggtggtgaactggctgaaccgattgagccgcgcctcgcgctgccgccaatcataggtctcggcccaatactggcagacgtccttgatccattgcagcggcgcgccctggctccaatcgtcgaccagttcggcttccggccagcgggtccggcgtagccgggtgcgcaggtcctcaaggacatcgtcgctgacggcgatacgaaacgggctgatggcggtattcatggcgtctccccggcgtgcagagctgtccgggaaagataggatcagaacatcagccgatcaaactaccggctgacgctatttgccgatcgccgtctccagaagcgactgggcctgtttggtggccgcggcgaaggccggctgctgtggcgcctgctggacgaagcaccgcttgaatgcgtcctcgccttgctgatgcaggtcgccgagcttgtcataggctgccttgctgatctgcttgcgctcgagcttctcggccgccgcatcggccttcctgttatagtcggtgcggatcgcggtgcaggccggcacctgcacggtgggctcgatctcgccataggcgatgtagaccttgccgtcggcgagcgctgcgacgaaaacctcgtcggcggcctcgggcgtcgagtcctgggtgcggccggccagaaaaccgtaggtaaccgtggccgacgccggcttggcgaccggcagttcgttgaagttgatcacggccgcatcggtcgagatcgcctgggtatagaggccctcgaacttcagcgccggttcgatctgctgcggcacgttcttgctgcccttgtcccaccaggtcttgtgctcgtgcagccagcgggtgaacagggattctgacgtgacgatgatatgggctttcggctcgacgaagctgccgtcggcgcgcttctcgccgatcttggcgccgtccctgccggtatcggcgtcgaagcgcaggccgtccagcatgccgaaccccatgtcgcccctatatagagtgtcgagattgagctgggcgggcgcaaagcccggccgggcgggctgggacaggatcgcgaccagctgccccttgagctcgtcgcgcgcggccgcctcggccttgtcgacggtctcgttgatcttgttgtcgttcgacagcttggcgaatttggcgatcgcggcgtcacgcgtcgcgatgtagcgatcttccggcgacgcggcactggccggcgacagggtcaggatcgggaagaggacgagggcaaggcggcaaataaaatgcatgccctgtggtcgcccgcagggcatgcaaggttcaaggtcacgggtactaccagcatatccgccgccggcaggccctctgccggcgccgaatctcgtcaggccgcccctatcaggcggctttggatttcgcgacgtgggtggcgatcgcgtccatcaacgccggcgacaggcagtcatagggctcgagcccaagctccttcaggcgcgaccggatcccggccatatcggccggcttgacgccggactcgatcaccgacgacacgaaggcggcaaatcccggtgccgccgagccttgctcctggaacagctcgggatggatgaagtcgaggccatagaacggatggcccttgttctcgatccggccgtacatgtgggtgccgcatccggtgcatgcatggcgctggatcaccgcggcggcatccacgatcttcagcttgtcgccgttctccagcacggtgacgttctcgcgcggcacgactgcgaccaccgagaaggtggcgcccgaaggcttccagcacttggtgcagccgcaggcatggttgtgggcgacatcgcccttgatcccgaccttgaccttcttgtccgcgcatttgcagacgagcgtgccgccggcaaaactgcctgagccttgtttgacgccattgtcgaccgacgggtggatatgaacagtcattggtctatcctcctagtgcttggtgttttgatttcagaatacgacgaccgaacggatcgacttgccctcgtgcatcaggtcgaagcccttgttgatctcgtcgagcttgagcacatgggtgatcatcggatcgatctggatctttccgttcatgtaccagtcgacgatcttcggcacgtcggtgcgaccgcgcgcgccgccgaacgcggtgcccttccagacccgcccggtgacgagctggaacggccgggtcgcgatctccttgccggattccgcaacgccgatcacgaccgagacgccccagccgcgatggcaggcttccagcgcctggcgcatcacattggtgttgccggtgcagtcgaaggtgtagtcggcgccgccgtcggtcaggccgaccagatgctggacgatgtcaccctgcatcttggtcgggttgacgaaatgcgtcatgccgaactggcggccccaggcatccttcgcgtcattgatgtcgacaccgatgatcttgtcggcgccgaccatcttggcgccctggatcacgttgaggccgatgccgccgagaccgaacacgacgacgttggagcccggcgtcaccttggcggtgttgaccaccgcgccaacgccggtggtgacgccgcagccgatgtagcagctcttgtcgaacggcgcgtcctcgcgaatcttggccaccgcgatctcgggcagtacggtgaagttcgagaaggtcgagcagcccatgtagtggaagaccgtcttgcccttgtagctgaagcgcgaggtgccgtcgggcatcacgcccttgccctgggtggcgcggatcgcggtgcagagattggtcttctggctcaggcagcttttgcactggcggcattccggcgtgtagagcgggatcacgtgatcgcccggcttgaccgacgtcacaccggcgccgacttcgcggacgatgccggcaccttcatgcccgaggatcgaggggaagatgccttcgctgtcgaagccgtcgagcgtataggcatcggtgtgacagatgcccgtcgccttgatctcgaccaggacctcgccggccttcgggccttccaggtcgagctcgacgatctcaagcggcttcttggcttcgaatgcgactgcggcgcgggtcttcatcttggtctccacaaaacatcaaacaggtttgtcattcgcgccggtcacgctcacttcttgtcgttgtggcccatgcaggcgtcttccgccttgccgtaggcttccgatttgtcttcgtgcttggccggccgtacgcgcccaaccgcatcattggaacgagcgcgcaggtacacatagaggtcgtccatgtagcaagcaacgttcggattgtcgccgaacgcgggcatgacgttctcctgcgacgtcgagacgttcttgcgtccgctcgcgaccacgccgagaaaatcggcatagttcatgctcttcagcgagtccttcagcgcaggcgcgtacgtcgaacccatgccatccggcccgtggcaaacgtggcattccgaatggtagcgccgatatccggagtaggtgtaccaatccacggtcccgtcagcctcaatcttgtaggtcgggttgccgtctttatcgagatacttgccgtcctcggatttgaccgctgtcgggtcgccgggagcttcggcaaaggcaactcctcccattgccacgaccaagatcgcagcagtcacaaaccagatcttacgcaaaagcatatcctcgcgtgcggattgacaacggaccggcgcatggagatcgccccatgcgccggaacgagggttgctcagctcactgctgcggcagcgagaacacggtgagcgttccgccgagcgcggtgtagttgctcagcgccgcatagccgccgactgcaccgagaccggccgtcggatcggtcagaccggccgcgaggccgatgcctgcccaaccgccaacacccgacagaacggcgacgtactgcttgccgttgttctcataggtggtgacgttgccgatgatgccggacggggtcttaaacttgtagagctccttgcccgtcttggcgtcgactgccttcagatagccttccagcgtgccgtagaacacaacgccgccgccggtcgcgagcgcaccggaccagaccgagaactgctccttgttcgaccagacgatcttgccggtcttgccgtcccaggcgatgaagttgcccatgttggtctcaccgggaggcggatacatcgacagcgtcgcgccgacatagggctgacctgcggtgtagctcaccttgaacggctcgtagtccatgcagacgtggttggtcggcacgtagaacagttgcgtgtccggcgagtaggctgccggctgctcgtccttcgaacccagcgccgccgggcagatgcccttgacgttgtggtcctcgccggccttgtcggtcgacgctgcgtcgagaaccttcggacgaccataggtcggcgagctcttgttcatgtcgacgccggaggtccagttcaccttcggatcatacttgtcggcgaccagcagttcgccggtggcgcgatcgagcgtataaccgaggccgttacgatcgaagtgcgtcagcagcttgcgcgccttgccgtcgatcgactgatccgagaggatcatctcattgacgccgtcatagtcccattcgtcgtggggcgtcatctgatagacccacttggcaacgccggtatccgggttgcgcgcccagatcgtcatcgaccacttgttgtcgccgggacgctgcttcggattccaggtcgaggggttgcccgatccgtagtagacgaggttaagttcgggatcgtacgagatccagccccaggtcgcgccgccgccgatcttccactgatcgccttgccacgtcttcaggctcgagtccttgccgaccggcttgccgagttccgtggtcttgtcgtcgaccaggatctggtcatccggaccttccgagaatccgcgccagaccagcttgccggtcttgatgtcgtaggcgctcatgtgggcctgaacgccgaactcgccgccggagatgccgatcagcaccttgtccttgatcaccatcggtgccgaggtgccggtcgaacccttgctgggatcgccgttcttcaccgaccattcgaccttgccggtcttggcatcgagcgcgaccagtgtggtgtcggcctggtgcaggaagatcttgccgtcaccataggcgacgccgcgattgaccgtgtcgcagcacatcaccggaatgacgttcggatcctgcttcggctcgtatttccagacgatctggttgtccttcgaaaggtcaatagcgtagaccttgttggggaacggggtatgcacgtacatcatgttgccgatgatcagcgggccgccttcgtggccgcgcagcacgccggtcgaaaacgtccaggcgacctgcaactttccgacgttcgaggcgttgatctgattcagcttcgagtaacgctgattggtgtagtcgccggtcggcatcacccagtccttcgggttctgcgacatcttgtggagttcgtcattggcgctggcagcaccgacggcaaacaccgccattgccccaagaccggtcgcgtaaagcatcttgcgcatcgtggatttcctcccaggttcaagagctcaagggtttccgccgaaacggccccacttcttccattttggttccccagtcgtagtccgatcgagccctgctgacttgcccaatagagaagagccgtttgctcaaaagcgaagctgcgacagatttttgcaggcccgccccgaattggcaggacaggttgcttcatgttgcagggcatcaatgcgggccgctgcaattcgagcgccagatcgacgcgtgctaaggttgcgcttgacgagtccagaactaagtcggaggatcgcccggccgtaaccgggaagaaatcccgccgcctccctaaactattcagaatcagggagaaggcgcatcatccgggccagactcaaacgcggttggcggtcacgttggggatcgaatcggtggctggaaagatgtccgatacagtccattcactcagcacgaacggattgacgcccaagcggcagatccagcgctggtcggatgcgctcactgacctctgcggtcagttcgacgtcgacgcgctcgaggggtcctcgctcgagggccggatcaatttcacgacggtctcgcgcttgaagctgtgccagatcgaggcaagccagcaccggatcgcgcataccatctcgcgcatcaagctgagcgagcatccctacatcaagatcgtcttccagacccacggcgtgtcgcatttcgagcaggacggcttgcacttcgacatcatgccgggcgactgcttcgcctacgacgtgtcctgtccgcataccatcatcagcccgtccctgacgcgccatgaggtcgtcatcgttccaaaggacctgctcaaggagcgcggcttccagctctccaagatggcgccgtgcaagctctcggcgcgcaacggcaccggccgcatcgcctatgatttcgtccatgccgcgttcggcgaggcgccgacgctgaccccggtgaatgcggtcggcgtcgccgatgcgctgatcgacctgctgctgttgccgctgcgcgagaccggcgccatgttcgaccgcggcagtgccgaggccacctatgtgcgggcccagggcttcatccgcgagcatctgcgcgatccagatctgtgcatcgaccgcatttccgcggcgctcggctgctccaaacggtatctgcacatgctgttcagcgatcgcggcatgacggtcagcgattacatctggaaggcccggttgcagaactgccgtcaggagctggaatcccagaacggcaagaccatcaccgacgtcgcattctcctggggcttttcgagttcctcgcatttcagccgcgtgttccgaaagtatttcggcatcgcgccctcctcggtccacaagggtctgcacggcggcctgccggcggatgtggtgctggaatagtgctgctgcccggcgtgcaggcgtcacgccatgctgtccgccctcaaactctcctcgatcaaagctttctcctcaatcaaggcttgggcgcgcaacctcaaacgcgacagcgttgcgctctatttcgcatcgcgtgacccgcgcgtaccgtggtacgcaaaggccctcgcgatcgccatcgcagcctatgcgctctcgccgatcgacctaattccggatttcatcccgatcatcggctatctcgacgatctgatcctgctgccgtttggcatctggcttgccatctcgctcattccagatgacgtgatggcggaatgccgcgccaatgccagcgcggtattgcagcgcccgaccagtcgggcgggaatgatcgcaatcatcgtgctctggatcgccggcgcattggcactggcgtgggccgctttcaaatactggccgcggtagcagccttcggcaccagcgcttcgaccgtcacgccatcatcggtggagttgatcttgagcgagccgccgagcgcgaggatccgttcctgcatgccggtcaaaccgcgcccaagcctgtgatcccttagcagcccgcggccattgtcgcgaacccgcaccagcgcgcagccgcggctgccgcgcaggccggtctgccgctccgcgggctcgatcgtgatatcgaccgccgtcgcgccggcgtgacggaacacgttggtgagggcttcctgaacgatgcgatagatcgtcagatcggccatctcgccggtatcaccgagatcaggcgaaattcggctgtcgatctccacctccgggtgcgtctcgctccacaaccgcaccagcgcgccaagcgcttccgcaagcccgagctcggccaaccctaccggccgcaatcgctccaggatgcggcgggtaaactgctggagcgcattgacctgctcgaggatggcgttgccgtgcttgcgcaatgccgcagggtcagccttgtccacctccgacagtcgggtcagcgcgccggcatgtgcgcgcagcgcaaacagatagggcccgaactcatcgtgcagctcgcgcgcgatctccttgcgctcggaatcctgcagcgagacggcacgttcggcgagctgccgtttgctgtccacggcctcgccgagcgtcgccgccaaatggttcagtttggcacatatcgccgccaattcaggcgagccgccgggctcgacccgcgcgtcgtaatccccggcctcgatgccgatcatggcctgcgacaatgcctccaacggcgccaatgcacggccgacaacaagcatggtgaccaagaaaagcgcgagcgcgatcgcggagccgacttcgagctgggtgacgatgccgtcccagatctcggcgatttcgtcgtcgggatgcgaggtgatgacaagcgattgcggcttgccgtggaccgagatcggcacccgcaccgaggtctgctcgggatgaaccagcgcgacgaaccactccggcggagcgcgcggatcggtgggctcctcagctcgctcgggagactttgcggtcgcgtcatcctgccgcgtgatgctgacgtgacgcagccggctcaggtcctgcacgatccggtcgagccgcgcatccggatccggcgcctcgtcgagaccagccacgatggtcgtaacaaactcgcgcgccagcctgataacactttggtcttctgcctgtacgcgaggtcccgcctccagcaccaggcgcgcgatattgatgctcaatccaagcgccaatatcagcgccaacagcaggttgatccgtgcgcgcaaggatagcttttgccacatgacgttgcccccgaccgcgatccctcctccgagaggatcgttgacagccaaatttgcccggctatctaatcgcaccctatcgcaatcccgtgcgaggtgcacaaccggtcggaaccgaggtgttcttcgtgcaagccgacgtgacgacacgtgaatcgaagcaggtcgccggaacaacgccatgcgcattctgatcgttgatgatcatcccatcgttgcctccggctgtcgcaccgtgttcgccgacgatcccgagatcatcctgctcgaagcatcggatgccgagagcggcgagcgcgcgttcgtcgcggagaagcctgatctctgcgtgatcgacatcaacctgcccaccgtctccggcttcgagctggcccggcgcatcctgacccgtgatgcctccgcgcgcctcatcatgttcagcatgaacgacgacccggtgttcgccgcccgtgccatcgacatcggcgccaagggctacgtctcgaagaccggcgaccccaatgatctggtcgaggcggtgcgcgaggtcggcaatggcggcgtctatctgccgccggcgatcgcccgcaatgtcgcctttgcccggccgggctttgcgcaaaatccgctctccaaactcacgtcgcgcgagatggagatcctgcgcctgctcagttccggcaagagcctgtcggagatcgcctggctggtgcattcgtcatacaagacggtcgcgaacacgtcatcgatcatgcgccagaagcttggcgtgcgcacctcggccgagctggtgcgcctcgcgatcgagagcggtgtcggctgacgccgcgcgccaacacagaggaatacgacgatgcagacggtttcccagaacaagtcgcatggcggcacgcagggcgtctaccggcatccgagccgcgagaccaggaccgacatgaccttctcggtgttcatcccggagcatgcagccggcgccaaattgcctgtcgtcacctacctgtcgggcctgacctgcacgcacgcaaacgtcaccgagaagggtgaattccgcgaggcctgcgcggagctcggcctgatcttcgttgcgcccgataccagcccgcgcggcgaaggcgtccccggcgatcccgccaacgcatatgatttcggcctcggcgccggcttctatgtcgatgcgaccgagcagccgtttgcgaccaattaccggatgtggagctacgtcaccgaggaattgccgaagctgatcgccgagcaattcccggtcgatacgacccgacaatcgatcctcggtcattccatgggcggccacggcgcgctgacggtggcgctgcgccatcccaaccgctatcgcgcggccagcgcattcgcgccgatcgtggcgccgtcgcaggtgccgtggggcaacaaggcgctcggcggctatctcagcggcaacaagcaggcgtggcgcaagcatgatgcggtcgcgctgatcgaagacggcgcccgcttctccgatctgctggtcgattacggcgacgccgacggcttcctcaccgaacagctacggcccgagctcctgaaagctgcctgcgagaaggccgacattcccctcaccttgcggcgtcagccgggctacgaccacagctactacttcatctcgaccttcatggccgatcatctgcgctggcacgccgcgcggctgaaagcgtgatccttcccgcgccaaagcggcgtgatacaaaaatgtcgaaaacaaccccatgcaaaggggccggttccggtgttcgaccagacgacttgacacgtcgggcaactcaggggtatatttctaatattcagaaatcatccaagcatccgtcgctcatcgtgcctgcggggcgccgtagttcggcgcgagcagacggttgcgcacgagataggcggtggcgcgcgaccaggattcgtcggtgttgccgcgcatgtcggcactcgccgcggccaccaactgcccggtatgcacgtcccgcaggtacagattgatgttgaggatgaggttggagaccttctgtaccacgccggtcatcgcgaggtcggccccgagctcgccggccagcttcacgtcgcatccgccgcaggcctgaagattgctgccgtgcgccgcagcattgacgggcgcgatatcgagcacgcggaacttgccggagtccgcgagctccttgcgcacctggtcgccggcccggagcagccgcgcctgctcgtcggtgcgcggcccgttcatctctccctgcaggctggtgtcgatcaactcgagatcgaacaccgcgagcttgggcggttcggctcgcaccgcccccgccgacatcgccagcaacgatacgaccaacgcgaacgctgttctcatgattgtgaaccaatcgaaatttggtacctggcaacgacaaaaagcggggttgcaagccaggccaattcggtcatcttgcacgtcaacgcatggtgcgacaatgccatgcccgaatgaacaaggactgcgggaggagttatgttccgatggttgatcggcacgatcgcgctcagcatgatggcgaccggagcgctggcggctgatcccgtcgagatccatatcggctatctcggccatgccggcgtcaaatcgacgctctcgctggtcgagcaaccggccgacaatgacggcatcgccggcgcgcggcttgcgatcgaggacaacaatacgaccggcaaattcctcaaccagcgcttcacgctcgacgaggtcaaggtcaaggacagcgacgatgtcgccagggtcgcaaccgatctcgccggccgcaacgactacatcatcaccgacctgcccgccgacgcactgctcaaggtcgccgatgcgctgcgcgatcgcggcaccgtgctgctgaatgccggtgcgatcgacgaccggctgcgcgagcaggactgccgcgccaacattatccatgtcgcgccgacccgctcgatgctggcggacgcgctcggccaatacctggtgtggaagcagtggaagcgctggctgctggtggcaggctcgcacgaccaggacaagctctacgccgatgcgctgcgccgcgccgccatccgtttcggcgccaagatcgtccaggagcgaaccttcgaggacaccggcggcgcgcgccgcaccgactccggcgtaacgctgatccagcgccagatgccggtattcacgcagcaggcaccggcctacgacgtgctcgtcgctgccgacgagagcgaggtgttcgcgaactatctgccctaccggacctgggacccgcgacccgtggcgggctcggcggggctggtgccgaccagctgggacgcggcacatgaccagtggggtgcggtccagatccagaaccgcttcgtcaagctgaacatgcgccgcatgacggcgctcgatatgcaggcctggaccgccgcgcgcatgatcggggaagccacgtcccgcaccaattcgggggattccaagaaggtcatcgctttcctcaagagcaaggatttctcgatcgccgccttcaagggcacgcgactgaccttgcgcgactggaatctgcagctgcgccagccgatcctgctggccgacggtcgtatggtcgtttcggtctcgccgcaggaaggtttcctgcatcaggtctccgaactcgacaccctcggagttgaccggcctgaaacgaagtgcaagctgcagtgagggagatgaaacgcatgtggcgccgccgtctgttgaccgggatgctcgtttggcttgccgcgacaccggcgtccgcttttgttgcctatgtctcgaatgagaaaggcaacacggttaccgtgatcgacaccactagctggacggtgacaaagaccatcaaggtcggccagcggccgcgcggcatcgagttctcgcgcgacggcaagttcgtgatggtcgcggtcggcgacgacgacaccatccaggtgatcgacaccaagacccaggagatcgtcgacaccctgccctccggccccgaccccgaattgttcacccaggatgccgccggcaagaccatgtatgtcgccaacgagaacgacaacacggtcaccgtgatcgatctcgagaagcgcgcccggcttggcgacatccaggtcggtgtcgagcccgagggcatgaccatcagccccgacggcaagatcctgatcaacacgtctgagaccaccaacatggcgcatttcatcgacaccacgacgcgccagatcgtcgccaatgtgctggtcgattcgcggccgcgctttgcccagttcaagcgcgacggctccgaattgtggatctcctccgagatcggcggcacggtgtcgatcatcgatccggtcaagcgcgaggtaaccggcaagatcaccttcgagattcccggcctgcgtaacgaggcgatccagccggtcggcatcggcatgaccaaggacggcaagaccgcgttcgtcgccctcggccccgccaaccgcgtcgcggtggtcgatggtgcgacccacaaggtgctcaaatatctccttgtcggccagcgggtctggcacatggatttcaccccggacgagaaatatctgatggtcaccaacggcgtttcgaacgacgtctcggtgatcgacgtcgcggcccagaaggtgatcaagaccattcaggtcggtgagcttccgtgggggatcacgatcgcgcagccatgaccgcaaccgacacccatatcgcgagccagccttcgccggatgcaggcaccgtagcggcggtgcagccggcgctgtcgatcggcaatgtcagtcacagctacggtccgcgccgcgcgctgatcgatgtcaatttcacggttcggcccgcgagcttcaccgcgctgctcggcctcaacggcgcgggcaagagcacgctgttctcgctggtgacgcggctgttcggcatccagaacggccagatcaagatcttcggtcacgacatcagccggacgcccggtgaagcgttgcggctgatgggcgtggtgttccagccgcgcacgctcgatctcgacctttcgctgacgcagaacctgctctatcacgccgcgctgcacggcatctcgcggcgcgaggcgcggcagcgcagcgccgaggtgctcggccgtatcggccttgccgaccgcgccggcagcaaggtgcgtgacctctcgggcggccagatgcggcggctcgagatcgcccgcgcattgctgcaccgtccgcggctgctgctgctcgacgaagccaccgtcgggctcgacgtcaaggcgcgcgccgacattctcgaccatgtccgccagctggtcaccgagcagggcatcggcgtgctctgggcaacccatctgttcgacgagatcatgccgggcgacgacctcgtggtactgcaccagggccggatgctggcgcacggcccgatgtcgcgcgtcatcgcggatgccggcgcccaggacgtcaacaccgcgttcatgcgcctgaccggaacggcaaccctcaccggaaaaccgccaacatgagcagcacgacggctacgcccgagcgacgcggcttctcggtgtcggaatacatcgtctgcctgaacggcatcgtgtggcgcgaggcgctgcgcttcctgcatcagcgcgagcgcttcgtctcggcactggtcaggccgctggtctggctgttcatcttcgcggccggcttccgccaggtgctcggcatctcgatcatcccgccctacgagacctacatcctctacgaggtctatatcgcgcccggcctgatggcgatgatccagctgttcaacggcatgcaatcctcgctgtcgatggtctatgaccgcgagatgggcaacatgcgcacgctgctggtcagcccactgccgcgcggctatctgttgttctgcaagctgctcgccggcaccgcggtgtcgctgctgcaggtctacgccttcctgctgatcgcgtggttctgggatatcacgccgccgaccatcggctacctcaccgtgctgccggcgctggtgctgtcgggactgatgctcggcgcgctggggatgctgatctcggccagcatcaagcagctggagaatttcgccggggtgatgaactttgtcatcttcccgatgttcttcgcatcgtcggccctctacccgctctggcgcgtgcaggaaggcagcccgatgctgtactatgtctgccagtgcaatcctttcacgcacgccgtggagctgatccggtttgcgctctacggcaagatgaactgggtttcgctcgcggtggtcggcggctgcacggtggtattcatgatcggcgcgatcctggcttacgatccgtcgcgcggcctggtgcgccgcggacccggcggaggcgaggcgtgacaggctggcgaacaggacgtggcgcactgctcgcaatggtgctgtcgagccaggtcgcaacggccgcggatccgcgttacccggactggccctgccaacaggccaaggtgccggagatatcgctcgccgcggtgtgggccggaccgccgctcggggatgccgagaccaagtggagggacgacccgaaggtcagcgcactcgcgaccaagctcgcggcgcgccgtattccgctcgaggatgcgcagaagcagatcgccgagttcctgcagtccgccgcagccgacaaggccaatgcgggaaaattgctgttcgcgggcctgttcgatacgctcaatgggcagcgggcctcggtgatgaatggactcgaacgcgtgatgcgcaagcagcgcgaggccgcggagaagattcgcgacgatacgatcaagctgcaggcattgcaggacgccacgccgccggatcaggccaaagtcgacgagctcggcaaccaattggtctgggagacgcgcatcttcgaggaccgcgggcgggtggtgaaattcgtctgcgaggtgccgaccaccatcgatcaacggctgtttgcgctcagccgcaccatccagcaggaactggattgaggcctccgcccgatcgccccggcaatcattgacctgttcccagccgcttcttgaccgcgccggtccggaaccaaccgcgctacccgttcgttgtctccaactatatctgaagttgggagacctcgatgagagcagccaagatcgtcatgaccagcctcgccgccgcgagcctgatcacctcagcggctttcgcccagcaaccgttgactggaattgtcaccaagattgaccgattgaatggaaccatctcgctccagcagacgcaaagcggaacggtgggcgcggccggcggcgcgatgctggaatacaaggtatccaagggtcagtccctggaggacttccacgccggcgacaaggtaacgttcaccacctcagacagcgatggcggcaagaccatcaacaagctcgacaagcagaaataaccggcacgacgcgtgaggacgggctcaatgctcgccctcgcgcggctcgggctccgattccgccagcggcaatttggcgcgtccccagccgtcggttccttccggataccacgccacgttgcggtagccgtaggacagcacgcgcttggccgcgttccacgacatccagcaattctcctggcagtagatcacgagcaatttggccttgtcgtcgccggaggcgcgggccaggccgcgttgcagatagccctcggtcgatgcggcgagcttgccgtagccggtgtcgggcagccagatgctgccgggaatgttgagatgcggccgctcgcgccacaccgtgccggcgggcagggttggcttcggcgcgcgtggcagcacgtcgacgaaggcaccggacttgtcgcgccagatcgctgccgcgtcatccgtcgtgagcacgcgtgcgccggcgagcgtggccggcaccggtgcgcggtagtcctcggtgcgatacccttcgggctccgcaggctggtcctgcgcgcggacaggcgaagcggcgaccaccagcaccgccaggatggccgcgaacctgatcatggcgacttggttgcgctctccggcccgatcggacggtcgttctcgtcgagcagcggaacgccgaagtcgagcaggatcttgttgatcgcgggctggttctcctggatcaggcgattgagctgccgcttccagttctgatcggacccgcgcacacccatgccgatgcgatacaccagcttcgggcccgtggtctccttgaccagcggcgtgacatgcagcggcgggttcgccttcttggcataatagcccgccatcggcccccacaggatgccggcatcgatctcgcccttgtcgagatcgttcatcatcgcctcagccgacgaatcgtagcgcgtgtcgatcatcagcggatatggcttcgcattgcccatcagcccgttgatggccatgttggtcgcgggcggcgttccggcgacgatgccgatatgcttgcccttcagccgctcatcctcgagcgtcgtgacctcatccaatccgctgcccggcttggcgacgatcgcgtaagccgtgcggtaatatgggttggtgccttgtgcgagatcatcgccttgcgggaatcccatgatcacgtcgcagcgatgcgagccgagggtgacccgcacgaagccggtcgcctgcgggaaatacatgtagtcgagcttcttctgcagcttctcagcgaacagctcgccgatcttgttctcaaagccttcgcccttgtcgttcgagaacggcaggttgcgcggatcggcacagatgcggagcaccttgggatcgaccagctcgatggagagctcgccctgctcattgacctgtgcacgcgcgatgtcgcggccggcgagacaggcgatgaaaccgacaagcgcgaacaggacaggacggcatccgacaactctcatgacgcggtctcctctcgagcggacaggtcaccgtggtcaagcaattgcccggcgcgccatgacgtgcaacagggataatgattgcgacggcgccgcgttgcttgttgcagcgcaaacggacgtgagacgacatcgttcgcgcgtcccggagaaactgaggcggaaacatggctcatggcggttcggtgcttgcgctgctcctgatgctttgggcgccgaccatagcgcgggcgcaagaggcggaattgcctgtgagcgaagtcgcccccggaatattcgttcacaccggcgtcactgcattgatgacgcgcgagaacgagggcgccatcgccaatgtggggttcgtgatcggcgatagcgccgtcgccgtcatcgacaccggcggcagcgtccgcgaagggcggcaattgctcgccgcggtgcgcagccatagcgacaagccgatccgctacgtgatcaacacccacgcgcatccggaccacagcttcggcaacgcggcgttcgtggctgacgggaccagctttgtcggccacaaggccctgccccgcgcgctggcggcgcgcgggcagttctatctcgacgggtttcggcgcaccatgggcgatgccttgatcgacgaggtgcggatcattccaccgaccgtgctggtcgaggacacgctcaagctcgacctcggcggacggagcctcaccctgaaggcctggccgcccgcccacagcgacaacgacctcaccgtattcgacgaacgcagcggcaccctgctcgccggcgacatggtgtttctcgagcatattcccgtggtcgacggcagcctcaagggctggctgcgcgcgctcgaccagctcgccgcaattcccgccgagcgcgtggttcccggtcacgggcccgtgagcgcgtggcctgcggcgctcgccgatgagcggcgttatctcgagacgctggccgcggacattcgtgcactggtcaaaagcggcaagccgatcacggctgcggcggagcacgccgcggcagccgagcgtccgcgctggcaattgttcgacgattacaacgcccgcaacgcaactgcagcattctcggaaattgaatgggagtagctgttggtcctataatgagctggatgcataggattccgcgaacatgaccggacatcgcgcccgcctgttttgcatcgccagcctcgttgcgatcgcgctgggcacaccggctgcgcccgcggcggagacctatgatccctggccgggtctcgtccaggacatcttcagcaaccgtccgatgaatgacggcaatgatgtcatcggcatcgagatgccggcgcgcgccgaggatgcggcgatcgttccggtgacactgcgcaccaagctatcgcccggcgacagccgccgcgtcgtcgccatcacgctcgtgatcgatgagaacccggcgccgatggctgcgaaattcacgctggccccggacgccaacgttaccgagatctcgacgcgagtccgcgtcaacaactacaccaacgtgcatgccgtcgcggagctcagcgacggcaagctctatgtcagcaaggtctatgtcaaggcatccggcggctgctcggcgccggccggcaagaatgtcgaggaagccaagaaccgtctcggccagatgcgctatcgccaattcacgaaggccgaacagggagcggcgacaagcacgcgcgaagcccagatcatgatcgggcatccgaacaattcaggcctgcagatggaccaggtcacgcagctctatatcccggccttcttcgtcaacgagctgcacatctggcaggacgacagtccggtgctggcgatggagggcggaatctcgatttccgaggatcccaacatccgcttcacctacgtctcgaacggcgccaggcgcttccgcgccgaagccaaggacaccgacgggcacgtcttcgagcacgaatggaagatcgagaatcccgggacctgaagggtccgcgaactcgcggtcaagactagaaacagcggacttcagcttcggcctgggcgcgcctgaggtcgttgagtgcgttggcggcctgctcggatgagcggaactggccgcccagattgccgcgcacctgcgccatgctcagcaccgtttcggcggtgacgtagcgatcataggggatgatggaggcgacgacgtcgatcgagcaggaacattgctcgatcgattgccgggattcgccattggccttcatgcagccgaacacatattctgcccgcgccgaggtcgggtagtcattgatctcctgggcccgcgcgcccacggaagtcccggcgagcactgccaggagcatggccgggacggcgacaatcggtcgtagcatgccagctcctgccatggtcgtgcttcctcttctcttcccgcaagctatgctatgggtgtcgatcagaaaagaagacattcggggaagtggctcaagaagcgatgatcatgtctgtacgcacggtgttggctgcggcagttctggcggtcatgcagttcggcacctcgtgcaatgcggagaccatccgcgttgcagcgcagaagaccggaacgttcgcctgggaactggcggtcattcgctcccatggtctcgacaagaaggccaacctgtcgatcgacgtcgtcgagctcgccagccccgaggccggcaagatcgcgctgcgctccggcacggccgacgtgatggtgtccgactggccctgggtgtcgcgcgagcgctcgctcggtgccaagctgcagttctatccgtattcgagcgcgctgggcgcggtgatggtgccggctgcctcaccggtcaggacgctcgctgacctcaaggggcgcaagcttgcggtcgccggcggcgcgatcgacaagaactggctgctgctgcaggccgccttgaagcaggacggcgtcgacctgaagtcgcaggcgaccatcgtctacggtgcgccgccgctgctcgccgccaagaccctcggcggcgagatggacgcgacgctcaactactggaatttctgcgcggcgctcgaggccaagggctttcgccgcctcgccggcatggaagagatcctgcagaagctcggcagcaagggccgcatcgcgatgatcggctatgtgttcgacgaggcctgggctggcgccaacaaggacctggtggcccgcttcatcgcggtgacgcgcgctgcgaaagaggttctggcgacgtcggacgccgaatgggatgcgatcgcgccactcaccggcgcgcaagatccggcgacgttgcaggcctatcgcgaccgctaccgcgaaggcatcccgcgccgtccgatcgttgacgaagaggctgatgcccgcgtgctctaccgggtgctggcgcagctcggcggccgcgatctggtcggcactgcgaccgagctcgatcccggcaccttctatcaagcgatcccgggagactagcggtgctgcgcctgctgtcattcgcgctgttcatcgcgacctggtggattgcctcgctcgtgatcggcgatgcgaagctgccggcaccgccggcggtgctgtcggtgctcattgccgaggcccgatcgggcgcgctgttcgtcaacctcggcgcaacgctggcccgcgtcgcgctggccttcacgctggcgatggcgctcggctcggcgatcggctacctgatgggccgcgtctcgctcgccaatcgccttggcgatccctggctgatcctgctgctcaatttgccggcgctcgtcgtcatcgtgctggcctatatctgggccgggctgaccgaggtcgcggcgatcgcggccatcgccatcaacaagctgccgaccgccgtcgtcacgttgcgcgagggtgctcgcgcgctcgatcctgcgctcgacgagatggcgacggcgttcgccttgccgcgcggccgcgcgttccggcatgtgatcctgccgcagcttgcgccctatatcgctgccgcggcgcgctccgggctctcgctggtctggaagatcgtgctggtcgccgaatatctcggccggccgaacggtgtcggcttcgagatcggcgtcgccttccagctgttcgacattcccctgctgctcgcctactcgctgagctttgccggtgtcgtgctggtcatcgagacggtgatggtgcagccgtttgaaaccaggctaacgcggtggcggctccgtgcagcttgaggtcaatatcaccggcaagagttttgagagcgcggccgggaagcggcacgacgtgctcgacaacgtcaccttcacgttgaacgccggcgaggtgggcgtgctgttcggcccatcgggctgcggcaagagcaccctgctccggattctcgccgggctcgacggcaactaccggggccatgtcgcgcgctcgccgggcatgcgcctcggcatggtgttccaggagccgcggctgctgccctggcgcacggtcgaggagaacgtgcgcctggccgcacctggcgccgacgacggcaagctgtcggcgctgttcgaggtgctcgaactgagcgcgcatcgcaaccactttccgggcgagttgtcgctcggcctcgcacgccgcgtcgcgcttgcccgcgccttcgccatcgagccggacttcctgatcctcgacgagccgctggcctcgctcgacaatgccctcgcgggcaggctgcgcgaccaggtcgcgaccctggtggcgagccggacgatgatgacgctccttgtcacccacgatctcgacgacgccgtccgcctcggcgaccgcctgttcttcctgtcgccgcggcccgcccgaatccttcacgtcgaaaccatagccgcgccgcgtgcaatgcgaggtgagccggagatcggcgagatcaagcgacggctctcgcagttggaccttgcaaatatgtgagacgccgtcatccttggatgaaagctgcagggagaggtttgatgttgcgcgcgttgattgctgttggtgtcgccttgctggtgctgccggcgaccgtgctcgcccaaagcaagggcaaaggcatccggctatggaatctgaccagcgccacgatttcgagcttcgagctgtcgccggccggcaagaatgaatggggccccaaccagacgctgaacgacaaggacaaggaagtcgaccacgacgagcgcctgcgcatcaccggcgtcgagcccggccgttacgatgccaaggtcggctacagcggcgccaggcagtgcttcgtccgcgacatcgagatcaaggccgatgccgtgttttcggtctccgacaaggacctgaaggactgcaacaaataggggttagcccgccggcggcttgccgtccgtgctcgcgcgatcattgctgtgcggatattcgcagcgccatcgcaccgcggtccatttcggatgctcgccgacccattgcgcgatgtaaggcggcgcagccatggcgcattgctgcagcgagccattccagttgaacaccagatgctgctcctcgcaggtggcgggcgacagcacggcacatacggtgacgatcagatcaatcgggttcatgcgcgatccctaagcgtgcccatgaaaaagataacacgacggaatacggagtcagccgatcgcaagtttcacagccccgtgaaacgacgcgagaacccggtctcgaggcctttgcgtcctagaaattcagaccatacaccagccgcgcctgttggcgctcgaaattgaccaggtcgagcgcggcattgctcccggcccgctgtccccaggcctgcacgctccaggtcgcggtcaggcgcgtgcgctcggagagctggaaataggcggttgggccgacgaatagcgcctgcccggacaattcatcgaggccgatcccgtcatacttcctcaaatagcgcacttcgccgccgatcaggacatccggcttcaccttggccatcagcccgaacgcgacgccgaccgtggcgtcctgctccgccgcaccggtgcgcggcatgcgtgtccattccggctcatagctgacgttgagggccgcaaccgcaagattcgggatcacctcgcggtcgaacgccactatgagttcggtgccgtagctgcggaccgccgcggcggtcgtttcgtcgatgcggttggcacgcgtcgccagcgcgaccgtcatgccgaagggcgcggcctcgcgaccgaggaagcgatagcggaaatcgaccgagacgccctgccacgccgattgacggcgatcgtcaaagcccgggacgccgttgatgtcgtacgcgccgaacgaagtgccgagctcgacacgaaagttcggtgccggaacgagctcgagctccatttcctggttgagcgcgcggtagcggccgccgtccttggcgaagcggccggtggtctggctctggaattcccgctcgccgacctccccgacatcggagccgatcatgaagccgaagatgtgctcggtatcaaatccttccgcgtaggcagcgagcggcagcaccgctgcaacgccggcgaccgcagcgcacagcgcccccacccaacgccctcgtttgatttccagacccatcgaccccggaccaccgcctcaggccgcactgtagggcaaagcagcacggcctgccaatcgcgcacgcggtgtcagtgtttcgtgggaaggatgcgggggaagctatccgggcggcggcatcgcggccgcgaaaggcgcctgcccggctcgatacagcaagctgcacgagtcgggcgggctgtctcgcatgacttgtcttagatcacttgtcttagatcacttgtcttagatcacttgtcttagatcacttgtcttagatcacttgcgcgctgcgcaggcgtacatgttgatttccatgccgaccggcacttcgacgatcttcggtgctttccaggccatttccttctcccaagtacaggttggcgcaagcctcgcgccgcacggcaagctagggctggcgcttccagggcgcaagccggccggataaggacccgacttcgctgctggacatgccgacacggacgacggctcgcgggcatcagcccggcttcgaaacggctgggaaattccgacactgatctgtcaggcattttccggctgccggaggacgacgcgcgcataagcagaccggattgcgtcggccaagtcttgcccgggagcgaaatcgcaactttatttgttatgcgcggaatccagcgtcaatatccggaattcgcccggcagaacgagcctatttgagcaggcgcaacagtgcccgaccggcgcgcgatttgaactctttcgcatccggtgttccgtcattgtcgggaccggcggccctgaaacgctgctcgacgagcgcgaggtactcgtcgagcgtcagggtgccgtcgtgatccggatccgccgtcttgagctccttcgcggtcagccgcccgcgtaattcgcgcacaccgagcgtgccgtcatgatcgggatcgagcttcgcgaacaggtcgacgtatcgacaattgcaatgtgccgccggacaagcggggaaccaagccgcgtccaagtgcctgtccccatgcgccgtcgagctgatcgaaccgttcgcgctgcggcacaagtgcgaaccgcgcttggcattgcgtattccgcactacggtaagccacggacgcatcagcggaaaagctgacgccttcgaccggcctgctgccgtggctggggttcgttcacgttttcgtattgacccgttttggtttcaggccgatggttccgtccgcaacgtcaggaataggcgtgcagagcaaggttcattgggaggatatgatgagacgcattgcgctggccgcaagcctcgtaattcttgcatcctatggtgcaagcgctcaaaccaacgagcagttggtcaagggtgcgactgatacatcgaacgttctcaattacggaatgggttacaatcttcagcgcttctcgacgctgaaccagatcaacaaggacaccgtcaagaatctggtgccggtctggaactacagtttgaacgacgaccgcagcgaggaatcgcagccactcgtctaccagggcgtcctttacgtcaccacgcacaacgccacgatcgcgatcgacgccaagaccggcaagcagatctggaagaccaaggtcgaatatcccgccgagacgccgcgcatcgtctgctgcggcatcatcaatcgcggcgccgctctctatgacggcaagctgttccgcaccaccctcgacgccaatgtgatcgcgctcgatgccaagaccggcaaggagctgtggcgcgagaaggctgcggacatcaaggaaggctactcgatgacggtggcgccgctggtcgccgacggcgtcgtgatcaccggcatctcgggcgccgagttcggtacccgcggtttcatcgacggctgggatcccgcgaccggcaagaagctctggcgcacctacacgatcccgacaccggacgagcccggcggcgacacctggaagggcgatacctggaagctcggcggcggttcgacctggatcaccggctcctacgacgccgaactgaacacggtgtattggggcatcggcaatcccggaccattcaatgccgccgtgcgccccggcgacaatctctacacctgctcggtgctcgcgctcgatccgaagaccggcaagatcaagtggcactaccagttctcgccgaacaacccgttcgactacgactcggtggccgagatggtgctcgccgacatgaacgtcgagggcaagccgaccaaggtgctgatggatgccaaccgcaacggcttcttctacgtgctcgaccgcaccaacgggaagctgctggcggccaatccctatgtgaacgtcaactgggcgaccggcgtcgacatgaagaccggccgcccgatcgagaccgacatcgtcaaggacgcgcgtgacggcaagaaggtcacggtctatccgtcgatcctcggcggcaagaactgggagccgatgtcgttcaatccgcagaccggcctcgcctacgccaacacgctcgctttcggcggcaagtacaagtccgagccggcgacgttcaagcagggcgaatggtatgtcggcatggacctcaccgatccctgggaatggggcaccggaccgcgcggccatctcaaggccatcgatccgatgaccggcaaggcgaagtgggaagcgccgagcgatattccgcgcttctcgggcgtgctctccaccgccggcggcgtggtgttctccggtcagttgaccggcgaattcgaggcgttcgacgccgacaccggcaagaagctctggcagttccagaccggctcgggcatcgagggacaaccaatcacctggcagcaggacggcgtgcagtatgtcgccgtcaactcaggctatggcggcgtgtattcgctgttctcgggcgacgagcggttggccaaggtgccgcccggcggctcgctgtgggttttcgcggtcaagaactgagcgcggagcacacgtgactgaaagagtacccctgttgacggcggcgatcttcgccgccgtcgcggcagccttgatcaccttgatcccggcggccgcacagcaagccagtgcaatcgacctcgaaggtcagtccgaccagggcaaggtcacctacgccaagaactgctcgcattgccatgggcccaacatggtcaactccggtacgatcacgccggacctgcgcgcgttcgccggcgacaagactcgcttcgtgaccaccgtgaagcaaggcaagaacggcaagatgccgccctgggccgatatcctgagcgaacaggagatcgccgacgtttgggccttcctgctgagccggaggccccaatgaaggccctcctggcgactgccgcgaccgcgctgcttctcggcatgacggcggcaacgcatgccggcaacgaaccgctcagagtatgcctcgacgaggacctgccacccttgtcggcgcatcatcgcggcaagccggatgccggcttcgacgtcgcgctcgcgcaagcgattgccgagcggctcggacgtccgctcaatatccaatggttcgagagcaagctcgacgaggattccagtccggcgctggaagctaatgccttgctctcggacgggcgctgctcgctggtcggcggctatgccctcacgacggattcgctgaaggcgcccggcgtcacgacggccaagctgccggactttgacggcgccacccgcgacgatcgccgccgccggatcccgatcggggtgctggtgccgagccagccctatatctattcgccgatgaccgtcgtgctcggtcccaaggccaaagaccgcaagatcaccgatatcggcgatctcgccggccttcgcctgacgatcgaaagcggcacgctgggcgatgccgtcctgatgaacttcgacaagggaaggctgatcgacgacatcacccacctcgttcccggccgcagcgacctgctcggagagctcgagcgcggcgaattcgacgccacgttgctcgacctccgccggttcgacgcctaccgcgcgagccgtccggataccaagatcacagcgtcgggctattattatccgatcggcgccaaccgcggttacgtcgcactcgagaccgacaaggcgctgctggacgccgtcaacaaggtgctcgccgatctgcaagccaaaggcaccatcgccgagctcggcagaaccgccggcctcacctggctcgccccgcgcgagccgatcatcctcggcgatgtctggctcaagatcctgaaccgctgagccgctcgcggcggcccgctatttcagatagttggccaggttcatgctctggatcttggcgatcgccgaataggacgccgtcagttgcgcctgataggtcgacaactgcgccgtcaccgcagcgacgtcgacgctggtgaggttggtcgacagggttttcgcgaaattctggtaatcgctctggctggtgctggcggtctcgatctgcgacgcggccgtcgaaagctttgcctgcaccgtggatgtcgcatccagcgcattgctggcaaggtcgagcgcctgcgagatattgctcgacgtcaacgtcgtgctgttgccgacgtatttcaacaaccgcatgacctgctcgaaggccggattgtcggcggtgacgccgtaggaaacggactgactgtccgaaacccgcaccgaggcgatctcgctgtcgcccttgtagtagctggtgtcagacgtcgtcaacgatccggtgccggtgtcatagctcgacagatcaacgggcgcggtgtcggtgcgggcgccgctgaagacatactcaccgtcatactgggtgttgagcaggccctgcatctgcgatatcgcctgctgggcatagttgatcaccgacgccgtcgccgtgctgctgccggtggtcgccgcgctgagttgggtgcgaagctgtgtaatgatatcggtcaccgagccgaccgccgaatacatcgcctgcaccttgttgtcggcgagattgctggcatcgatataggtctgggcacgcgtcaccgacacctgcagattgatcacgcgcccggcgttggagccgtagccgccgaagtcctcggattgcagtccggaggactcctgcacctgttcattggccattgcggcctgtaggcgcagcgcaccggtgaccatctgatccgacagcgcaaaggtagcaacacgcatcatcatgacgatggcctcacgctgtggtcatcgcggtcatcaacgccgagaacatggcgttaatggacgtgatgatctgggacgcggcagcgtatttgttctgcaatgcactcaggttcgcgctttcctggtcgatgttgacgccggattgcgacgacatcgagctcgcataagtcgactgcgcggtctgcttggcggtgtaggtcgacgacgcctgagcggccttgccagcgacgttggcaacgatcgctgccgcgtagtcggtgaaggagccggtggtggcgccgagcccgcccgccatggcgaaattggtcgaccccgtcagcgcgctcgagagtgcattcacgacggtcgccgagcccgccgacagcaccgagcttccaaccgccagggttgacgacgcgtcgagcgtcgacgtcggcagcgccgccgtgccgttgaggatatcgctacgtaccgcaatattcgaagcgctggtgccggtgatcaggtcgttgagcccgaagtaatccgagaatccctccgccgagctgccgaccgagctcgtcatctcgttgatggcaatgccgttgcccgatccagaggcagagatcgtcaggtgtccgttggcatcgaccgacgcggacacgcccgagattccgttgatcgctgtggcgagcgcgccgactgtcgtataggacgccagattgaggtcctggtaggagacgaggttgccgctcttgtccgcgaccgcgatccgcaccgtgccggtcgccgagagcggcgtcgcgttgctcacggtggcagttccggtcaggctggccgggggcggcaccgatgtgccctggttcgataccgcgttgacgctggcggtcagctgctgggcgagctcgtcgagctgcgactgcgcggccggcagcgtctgatcacgcaggttgaccaacgcgctgaccttgccggaggagatctgcgaagtgatgtcgaccccgttgacggtgatgccactgaagccgctcgtcggcgagcccgcgacatacgtcgtcgatgccgtcacattggacgtcggggtgaagcttaggggatgggccgtgctgtcgaccagcgcctgccccgagccggtatagatctgcagatcgccgctcgatgtggtgaaatagctcacattcatttgcgacgcgaggtcctgcagcgcactgttgcgctggtcctcgaggtcggcagtgggctggcccgcggccgcctcctgcttgatctgcttgttgaggtcggagatctgctgcagatcggaattgatgtcgctgaccgacgaggcgatgtcctggtcggcattggcacgcagcttctggatacccgtcgaggtctgctgcagctgcgtcgtcaccgcgctgagcgcgctgacggcgttcgactgcagcgacgcgctgctcggcgtgctcgccagcgacgacagcgccgattcgaatgctgcgagcgtgttggcgagcgaggtgcccgtcgtcgaactgcctccactcgacgtgctgccgtagagctgctgcagctcggtcagatagctgttgttggtgttggcggcaccgagatcggaatcggctccgaccagcgacttcaagagcagcttgtcgaccgcgctgctgatcccggtgatcgtgacaccggtgccgacgcctgcagtgacgttgctgctctggttggcggtcttctcggtatagcccttggtgtcggcattggagatattcgccgaggcgatgctgatctgcacctgcgtggcggacagcccgctgaatgcgatgcttcgtgcaatatcgagcgacgacacgacccactccctccggcgccggcccgatcaggcccgcacgttggtgccataggacatcgcggacgtgacgcgacggccgccggcgccgtagggcgatacgttggcgatctgctcgcggatcgcctgcatgatcgcctcgatcctgcggttgctggcatcgatcgccgcgcgcagccgcatcacattctcgtccatcgcgacccggagcttcaggatccgatccagcagctgctcccgcagcacgcgatcctggacgttgaggtttgcggccttgccgacggcttccgccacgcactgctcgaacaaggaggcaagccggttcttctcgtcgacctgcttcagccgcgaggccggtagccccttggcgagctcgacattctcctcgttcacgatcgcgatcagattgtcgatcagcgtgatcaacgacctggcgcgctcgtcattgcccgcgggattgatcttgatgttgcgttccggtgtcatgtcatcgctcccgttcaagctagtgtccgcgacgcagggcgcgaaccgattgtgcgctgcgcccatatgcggtgatggccgttacccgggccgaagcccggttgaattcctggtcgagccgtacgcattcgcgcatcagcagatcgcgtaaggttccgatatcgtcgagcagcgcaatgagctgcgcccgatcgccggccctgacgctggcggctcgcgcggtcaggcgccgcagctttcgcaacagggcatcttcgcggcttgcgtttgccatcatcgcgacaccgccgagatcagcgtatcgaacatcttgttgacggtggtgatcacctgcgacgcagccgaataggcctgctgggccgagatcatgttggagaactggccgctggtatcggtggtgctcgattccagctcgctgccgtagatcgtgcccgcaccgttgttgcccgaggtctgtagcgtggcgttgccggaggccgccgtcgccgagtacatgccgtcgcttgccgcggtcaaaccgttggggtcgctgaaggtcgcgaccgcgatcttgtagatcgcgatggtctgcccgttggagtaggtggcgtcgaccacgccgcccttgccgatcgcgatgctgctcagcttgccgtaaggcaggccgtccgagttgatgctggtaagattgatcgcgggtgtcgtttgccccgacgagtattgcgtcaatccgtcggtcttgccggccgtgccgaaatcgagcgcaatggcgctggtgccggaactgtcggccgcgccatcggtccagccggttatgctgatgctcggattggccggcgtcgtcgaggccagcgacccgtcggggttgaaggtgatcgatacagtatcggtgatcggagcggctgtggtcttggtggggtccgacgccagtttcggctggccaaacgaggccgtccaagtgttggtgccggtcttcgcccaggtgacctcgaccgaactcgcggttcccagcgaatcgtagaccgtcatcgagctggtgaacgcgggagcggcggcggtggggggtgttgccgtaactgccgcatcagacggcaggttcaaggcaaatgtcgtctttgtggtggcgctgccactggtggcgaccgcttgcgtgttgatcggcgccaggctggaggcggaggcattaccgatgatgttgccttgagcgtcggtgcgccacccctcgaggtaattgccgttgttgacgagatatcccgagttgtccgtcgtgaacgcgccgttgcgggtgtaggaggtggtgccgccggtcgtcgcattggtggtgacgaagaagccgctgccctggatcgcgacgtcggtggcgttggtggtcgcggcgagcaatccctgctgggtgatgttggcgcggccggatacattgacgccgccggatgtgtatgaggtggcgctgctcgacgccgtcaccagatcgttgaacatcgccgacgtggtcttgtagcccgtggtgtcggcgttcgaaatattatcggaaatcattgccagcgactggctctgcgcgttgagcgccgagatcgccgaggaaagtgcaccagtgagactcatgataatactccggaagcaatcaggacgtgacgccgatgatgttggcggcgctgaccgggacgccgttcacgagcaacgagggcgtcgagccggaggcatcgatcccggtcaccgttccagtcatcgtggtgtagctgagcagcgagttcccggccgcgtcggtcgcgttcacctggatcgtgtactggccgccattgctgagctgggtgccgctcgtggtctgaccattccaggcgaaggtgttggagccggcatttccggtccccttgccgctccacaccgtattgccggaggaatcctggatcttgatcgcgacgttggaagcggccgaggtgagcgagtagccgaaggtcgccgagccgttggtgagctccgccgtgttcgtcttcgcctcgacggtgtggccgatgtagttgaccgagttgagcgtcacgaggctcgagaacgagttcgcgagcgacgtcatgctggcgttggtcgactgctgttcggtgaagttggcgtaggaggtgagctggttgatgaagtcggtcgtgctggtggcgttcagcggatcctggttctgcagctcgctgacgagcaggttgaggaaatcggtcgagctcatccccatcgacgcgctcgtcgacgaactcgacgagcccgaggcggcggaggttgcagcagaggttgccgaggaaacggtcatgacaaggctctcttcgccgctggctaaggcgacggaacgcgttgaaacattgggatcgtgaagtcgttcgcagataaaacggatgacgcgccgaattcaggcgcggattcatccgtgcggaatcacttgattaatcggcagaatctgccgatcggccgcggtcccgaggcgtccaaatgcatgcaggccaacgcgccacgcgaaggcgcggcgtgccgcaaaggcgatgcggaagcttagagcgagaggctgagcagcagatccggttcgccgagcatcaatgccggcggcgccagcgcgggcagcaggcacagcgccagcaacagggccggcagcaccttgccttgctgggcggattcgcctggcccttgcgcatcgtttggctgcgcgtcgggcgaagccggctccgagcccgacgcttgcggcagatcctcttgcggcaggtcctcttgcggcagttccctttggggcagttgcgccgccgcggtcacgatgcggtcggcaaggcccttgggggcacgaaccggtggcgccgcgagcgcccggcgcactgcgctcgcctgctcatagagcgtccgcgcttcggccgaagaagccagcagctggacggcggcaagacgctgatcatcgggccagcgggataggtcctcccccagccggtcgatcaggtcttcgaatgtcgcaacgtccatcccgcgtgcagatccagcctcgtcgccaaggccgtcataaagcattcgcgggacggcggaaatcaatttccgccgccgcagcgtcaggtccagcatggtgctcaccgggcggccattttccccatcaggacgcccgcccgggcgccctgccccccgcccggaaaggccgcttcgccgggcgattcgtgccgtcccgcgctcagcggccggcggctgattcgagcgtcttctcggatgtcttggccttggcggccttgccggcggttgcctcgacgaacttccaggcgtcgcgaagctccgtcaggctggcgatgatgcgccggaaattctccttggcctgcggtcgcccataggagcgcaggcatgccatgatcagggcattgtaggtccggaacaggcgatcggccatcgccccgccgcgggtgacgtcgagattgtggctcagtccacgcaggatcgcggtcgcccgcgtcagatgggcgtggccttcctcgaagcgcttcgcctcgtgcgcatccagcgccttctgcagaaacgtgatggcgccgtcgcacagcatcaccaccgccttcaacggcggcaccgccaccgcggcggatcggtaggcattgttggcgtggtaggccattgcattctgggtcattatttactcgatgatgcgttcaggagggcgctcaggtagcccagcgtgttgttcgcgctttcgatggcggcctggtaattggcgaattgaagctgcagctgcgccttgaacgtcgccgcattgctctggatgtcgctgacctgggattgcaggtcggtgtcgcgcgactgcagattggtgatcagcgtctgcagctggccgctggtcccggcattggtgtgcgcgagctggtagatctgcgatgcaaggcctgatgtcgacgacacggtgatcgattgcgaggtcgaaccggtgtaggtgaacgccatcccggcgtagatcgtgcccgagttgccgataatggtgttgccgacgaccgaaaagccggaactgtcgccgccgacggacgcgccgttcagcgtcccggtcgaatccaccgtcacgtcgagcgtgaaggattgcggcgacgtgccggtgttgacgacgttcaactggctcgacgaggtcgtggtctgcgccgacagcagcttggtgacaccggcgagattctgcgtcagcacggtcgacagcgtgccggtgtcgagctgcagctcgttgttctcgttgaacgacaggccgagatcggccatcgtcatgccgttcacggtcccgctcagcacctgctggagctgggtcatgatatcgcgcatcgtgctgtcgccgaacagcacggcgctcgatgcggccgtgccgtcggagttctgcgcggactgtgcgatcacctggtcgcgaaacgcattgtagttggtgacgaaggtctgcagcgccgtggtgatctggctggtgtcggtctggatgctgatgttcaggctggtgccgctcggcgtcggctgcagcagatcgaaggtgacgccggagagcacgtcggaaatatcgttggtgttgcgggtaagcgcgatgccgtcgaggctgaattgcgcggactgcgccttctgcagcacattggtgaaggcccccgtcgtgtcggtgacgccgagcttgttcatgatgtcgtcgcccgaggtcgacgaataggtgatgttggcggcatcctgggtccccgtcagcaccatctcataggacccgctcgacacctggacgatcgaggcctggacgttggtggtcgaggtctgggcattgatggtgtcggcgacatcctgcatcgacatgccgctggtgatcgagatcgcggcgctgctgccgccggccagccccagcgaaaacgtgccggagaggcccagcgccgtcgacgtgctcgattgcgtcgagccgatcaccttctgcgcggtcgcgagctgggtgatctggagcgtgtgattgccggtcgccgagccgctgttgacgctcatgttgagtgccgaggaggcgctgacgtcgccggtggaggaaatcgtcgccgagcgcgtggcgaacgcattggtggcgatcgagttgatgatcgaggtgctgagcgacgacaggccgctggccagcgtcgacagctcggtctgcagggattggtaggcggtgatcttggcctggttcgcagtgatcgatgtcgtgatgttggtcgcctgcgcgagcttggcgttgacctcggcgttgatcagcgcggtccagtcgatactggccgaattagtggtgccggtcgttgtcaccgtgctggcggagctcgccgacgtcgtgcttgacgtgctcgaggtgcccgaggtcgcgctgctaaccgtcatgtcgacacttccgccgcaacaagaatcgggccggcatcatgccggcccgatcagccgttcaaactagccgagcagcttcagcaggtactgcggcatctggtttgccgccgtttccgccgaaaccgcggcctgggtcttcacttcggccgaagacagcgtcgcctgctcggcggcgatatcgacgtccttgatcgccgaattggcggactgcaggttctgggtctgggtcgaaatcgagtcggcgctgaagttgaagcgcgattcctgggcaccgatctcggcacgggcggacgacacgctgtcgatggcgctgtcgagggccgacatcgcgctggtggcagccgacagcgtcgaaacgtcgagcgaggtgacgccgagcgaggacgcggtgaggttggtcagcgtgatggtgatggtgtccgccgaggtcgagccgaccagcaccgcgacgcccgaggagaacacgctcgaaccatccagcaggctctggctgctgtagcgggtgccggtagcgatcgagtcgatttcgcccttgagctgcgtgaattccgagttgatgtaggcacggctggaatcggcgacggtgccggaggcggactcggaggccagcgacttcatgcgggccaggatgtccgagatgttggaggcgccgccgtcggcggtctgcaggatcgaggtcgcctgcgccgcgttggtggcggcctgctgcagcgtcgtgatgtcggaggaaatgcgggtcgagatcgcgaggccggcggcgtcgtcggacgccgaggtgatgcgcgagccgctcgacagcttcgacagcgcgctggtttcctgcatcgaattgatgttgaggtagcggaccgcggagttggcggcggtgttggtggaaattgcgggcatgagtagctcctgtgctgatggggcatggcatgccgcatcgtgagaaagtgaggtgacgcggttccagcccccgtccgcccgatcaaacgggtcggccgtcggtggtcaggcgcgaaatcttcagaagccggaatttatggttagcagtcggtaaacgcgccgcgcaggtcacgctcgtgccgcttcagcatctcgcgaagctgttgtcgcccgcgcttcagcagcgactccactgcggctacggtcgtgtccatcacctcggcgatctcgccgttgctcatgttctcgtgatacgagaggatcaccgcgacgcgctgctgctcgggcagccgctgcatcgcgacctccagcagattgccgatttcattgcgctcgatcacagtgctcgcatcgagctgcgtgtcggcgacctcgggcacgacatcgacattctcggtgcgcggcttgcgacgcagatcgatgcagcggttgctgacgacgcgatagagccaggttgagaacttggcgcggccatgctgccagcggccgcgatgcgtccacaccttcagcatcgtgtcctgcaccacgtcttcggcgtctgcggcgttgccgacgatgcgcagtgcgatcgcgtaggcgcgatcgacatgacgttcgacgagagcacgaaacgccgcctcgtcgccggcggcgaggcggtcgagcagttccttgtcctcgtcctggatctcgacggtgtcgagcgggcctgcatcggcaacggtggggacgttgctccagggagcagccgcttcgaccggcgcagccgcggccgccgtggcctccacctcgaccgctgccgtcacatcaagcgcgtaactcatccgccgctctccaaccaacgccgctggcacacatcccatacggcttctgagcgttgaacggagggctggagtaaaccaggcgaactttttttgttatttttcaaatgcttagctggattattttgccgactgcccggcaaaagctgccgctgcgcggaggcgcagccggcaattctacggagaatggagcagtcgttcagcatcgcctcgcatgcccgcggaagaattcgtcgcgtcggaaaacgctgttgtcacatcaactaacgccacgcgaacacatgcatgcgcggagcatgcgggtgatccatcgccgttggtcgccatcttgcattcgatgaattcgactaggcaattttttccgaatcactatttcgacgttatcggattttttgaatctgtcagtcgcgaagcgcgcgttttcgaatcccgcatcaacttttttgaatgatcgcgcctgatttgtctcacgcaggcgttcaacgcatgaggaccggcgggaattttgcgcatgacgatcatgacggtcgacgcaacgcgtcgagcgcagaatatttctgcatgttcattcgatgttttcgatacatttctgttgcgtgcctgcacgacgccagatggcgtatttgaaagggtttttcagctttcgcgcattgctgaaaaatttccgagcatgtccgtcagtttcgttcagcatcgaatccaggcagaggcacgcgcgcgcaagctggcgctggagcgcagcgccaccaccgaagtgcgcatcgccgacatctacaagtactttccgttcaggttgttcggcctgaaccgcgatgcgttgcaggatctcgcacggatcgaattcgacgccgagctcgagctgtgccgcgtcaatccggaaatgctcgagcaatatatcgacatgaagcgcggcggttttcgcaccggattcatctccgacacctattggaataccgaccagctcgcgcagctgctgcggtcctgcagccccggactgacctgggatttcctctacgcatcctgcgatcacggcagcagcaagagcgaggcgctgttcggggcctatctcgccgagcagggcatcgacgccgcgagctcgttccatgtcggtgacaatcacaacgcggatatcaaaggcgcccgccgtcacggcatccgcccgcgctattatccgcaggccagcgcggcgctggcatcgaagctccagcgagagacgtcgatcttcgaactgctgtgccccgatcagccgtcgcgactcgattgcggcgcgcgcacgctacggcgcgcggtgacggcccggagcgcagagcagtctccggccttcaacctcggcgtgaccgtgctcggccctgtcatggcggcgttcgacgcattcatcgaagcgcggcggacggcgctggcgcgcgagggcgcacgcgttgcgatcggattccttggccgcgacggtctgctgccctatcgcgtctggcaggcaagtcacgacgaaaccggcgcctatctcgagatcaatcgccgtgtcagcctggtcggctccgccgacacgctcgaacctctcagtgagctattgagccgggtcgtcaagatcgacgcgccgaccttcgtcgatatcgtcaaggtgcagccacccgcggtgatgaatttcttcgcgcagtatcccgacggcattgcgagcggccgcgaactcgccgacgcgctgcccgatctgatggatccgcgcgaaatcaccgatatcgccgccggtatccgcagccgcctgctggcctacattcgcgccaagatcgcgaatttcgacgactgcaccgacctgatcctcgtcgacctcggctattccgcgagcgtgcagaagtcgctgcggcggatcttcgatcgcgaaggcattcgcactcgcctgcacggcgtctatctgctgacgcttgacgatgccttcgacgacgtcgccgacgacgacaccgcggaaggcctgatctcggatcgcatcgtcacaccgcacgtcaagcgcatgctgatccgcaacgtcgcgttgctggagcagctttgctgctctgacgaaggatcggcgcgcgattatcgcggcggcgaagtgttgcgcgagggcgatcagcgtccggccgcccagctggcgctggcaaacgaagtgcaatccggagcgctggcctatgcatcgcgcgcccgcgatttggccccgcgctacgcattgcagcccgatgcggaccccgctgttgcggcacgatgggccaccgccgtgctcggacgcctgctgctgctgcccgacgatgacgaactcgtgctgctcggcggtatcaggcatgacgtcaacctcggcacgcaggcgctggcgccgctgctcgacgccaacctcatcaatgactgcatcattgcccgcggcctatccacggcatgcactgcaccggcgccgccgatgtggctggccggaagctttgccgcgctgtcgccgtcgcacgcctatctctacacgctgttcggcgccaaccgcctgcctgcgaacgtgttcggcgaggcgcaatgcggcaccttgcaggtcggcctgttcgggcacgacggccaggcagcgctcgaacccgtcagcgtctatcacaccgggctcggcgacctccgcctgcggattccgctgtcgcggcgcatggcggtcgcgaccattgcactgccgctggcaaagctcacccgtcacggaatgctccacggcatcacggtgcagtacggcgagagcgccgcgaaggctgctgagagctcgaacctgaagacggtcgcggaggcacggctgatcgatgccggcctcgagaggcgcggccgtcagttccgtgccgacaccgacgacggcatgctgctgatcccggtcgacggcttcgaagccgatgttgcgatctacacgatcgcgctgaccgcactcgaccacgaccgcatcctcgccgtcgaggaccgcgacgataaccgggcgcccgcggccacgctgagctggcgcaacgccaacgatgcgaaagcgaccagcgccgagtgatttgtccgcctgatctggccgccccgcccgtagaaggttaacgaggggtagcgcgggcatgacttcggctgacacggtgcaagcggacggcttgcagacgaattttgatcaattgctggcggagagcggcatccggatgagcgctgcgcagcgccggcgggtcgcctggctatccgaccggctcggaggcgcgaccgtccatccggctggttccgagccggggcgcgaccatggcgtcatcgtcctcgccgaaccgccgagcggccccgctgctgaattgctttaccggtcgctccgcaccgactgcgcgatcgttatcccgttcggcgagaatcccgcgttcgatttcctgaagtccaagctgaccgacttcgggacgatcgggccgagcttcgacggcccgcacgagatgtggtggggaggcctcaactggcgtcccatcgcaccggcggagggcgcgcgatccgacgcagcgctgcgcgtggtctcgtgctatccccgcgcccgcggcgacgatcctgcccgcgcgctccgggagaagctggctgaattcgagatcgcctgcgacatcgtgccgatcgacactgccgacggcgagcacatgcgtccatccgagaagtccggcttcatgctgcgaatgtgggaagagcatcgcgagccgctgctcttcatcgaggccgatgcaacgctcagcgagccgccgctgctaccgtcattcctcgattgcgacatcgcgctccacaagtggaaccggtgggagatgtcggcgcgcactctgtatgtcggtcgttccccggccgccgaggcgctgctgcgcaactggcatcacatcgcgaccgcctatcccgcggtctgggagggctacctgctcgaccaggcctggagcctgacctcgtcgcagatggcgctcgacaccgtctggctgccgcgctcgtatcatgcccccgcggaggacgccggcacgcctcgccatacgacgatcatccacaacctgcccaccgacaacagcgatctcggacccgacgccgaattcggcgtcgcgatgcgcccggcgcggcgcgccagccgcagcggcggtcgcgacgccatgatcgtggtcaagtcgcaggcagcctcgaatgacgcgatcaccgtgatcatgcgcgacatcgcgaccagcgacgcgcgcgagatggctgccagtattgaggcaatcaccgacgcgttcgctgccgattgcggcgggttcggccggctggagctcgcgctctgcccctggcaggacgatattggctcggccaaatcggccgccgccagcacgaacaaccggatcatcgagattgcgccgtggcagactttgccggccgacctgttccgcaccgtgggccaatcccgcgacgccggcagcgtcgtcgtcatggccgggcaacgcggctgacatcaggacaagagtaagagaaggataccgacatcatgaagaccatcatccttctcaccggcgtcgccagccagcaattcgcgctcaccgaactgttgaaggcgcacaatccggcgctgtcgttccgctgcgcggtgacggccgaggacctcgcggcgatcgagcctgaggtgttgcgcggggcccggctgctcgcattcaccaccagcgtcatcgtgcctgaaagcattctggcggcgcttggccacggcgcctacaattttcaccccggcccgccgcaatatcccggctgggcgccggcgcatttcgcgctctatgacggcgcccgcatgttcggtgcgacggcccatgtgatggccgcgcgtgtcgattccggtcccatcgtcggggtcgagtccttcatcgttcccgataagatcagcgtgcgcgggctcgagcagattgcctatgttcggcttgcgcatcttttctggcggatgtcgcgcgagcttgcccgcgagccctcaccgctcagggaattggacatcgcctggtgcggcatcaagagcaccaggcagatgtaccgcgacatgtgcgagctgcccaccggcatcagcccggccgagctcgcccgccggatccgcgccttccacgacgacttccgcacgatcccgttgaccgtttccgtgcacggtatccgctttcagctggcgacgaccgccacgctggagcccgaggcaccgcaggtgttctcgccgccgctcgccgcagcttcctagcgccgccagaagcttccctgagaatcggcgagcatttcgtttagcagcgcttcggcccggtgcagcagcggcttcgcgccattgtccgatgcaatcgcgattgccgcgcgcagctggttgagaaccaaattcgtctcgtccgcattcgtggcaggcgatatagttgcctcgctgaacagcgcctcggcttccaggccggagaagccctgctgccgcgcagtgttgcgcgcctctctcaacgtgttcagcgcagcctgcggatcgccaagccggctgacagcgagcgccaggtagatcgaggttcgcagcacaatcgaggtgtaaccgaccgatctggcttcctcccgggcttcaataagcgtcagccgcgcttgatcgagacgcccctgctccagatatgcgataccgagatggcacgcgacaaccggcacgaagagccgaattccatacttctgcgtgagcgcgaaagcctcctccaggatatcagctgctcgcgcggggttgccctgcccgagcatcaggaagccgccactgtatcccgcggcgacgcgatcaaacggtcgattgctctcattggcgatcgctgccgcgcgctcgtgaaattcgataccgctgtcgatctctcccagcgtcgtgtgggttacgctcttcatcatgcaacacagcaacagcagtgttctcggtgtggtccctggcggcgcgctggcatccggcccggaaaggcggaggcacgcctctcccagcatctgctcggcctcgcggaaccggccggcgatgaaataggcctggcccaggctatactgagccaggttgagccaaccgggattgccccattccccggccaggcgagcaacctcctcgccggtttcgattgcctctatcggcgtgccgtaaaagttctgggctcccgacctgaccgccatcgccgcgacttttcgcccgatatcgtcgactgcgttggcacgtccctccgcatcccttccaaggtcgaaccattcggcgaccttgccggcgctcatgaacgccgtgcgcgcctcgatacgaaggtcgatcgcatccgcttcgcgcgagcgggcgaacggcgttttgtcgagcgcggccattgcgatctcgaagtagttgatcgcatcggcaaatgccgatcgtgccaggctcttgcgcgcggcagttctgccgtaagcgaaggccttctgccaatccttcgcccgcattgcgtgatagcagagcttgttaggctcatcgtaggaactgccgttgtcttccagcgtcgcaagaatacgggcatggacgctctctcgcagcttttcgaccatcgagtcgtaggttacctggcgaaccatctcgtgcgggaattcgagcaagctgtcctgctcgagatcgatcctcacgagaaactcggcgcgatcgagcgccgtcaggcagcgctgaaaagcctcttgcggcaggccggccacctcacgcagcagggattccgtcgaagacggtcccaacgccgccgcaatctgcaacagcgagcgctcttccttcgatacgcgatccagacgcgtggcgatgacgccttgaatgctgctcggaattccgagatcgccgaccgggcgcgcgagcgccaggtcgccccaatgtccccggaggactccactgtccttgaggctgcgacaaacctcttcaatgaagagaggtacgctggccgtatggagaacgacgcggctcttcagatcagccatgttcgcggacgcgcccaggatgtcgtccagcatctcgcgtcccgcatcctccccgagcgaacgcaacgccgtgatttcggcgttgctgcgcgcaacccaatccggaattccgttgggccggctggtcagcaacaccagcaggccgggtgccctcagcgaagcgagtgcagccataacggtctcgctggcgcgatcaatccagtgcagatcctcgatgaggatcaccgcacgccggcggacgaccaggccttcgacaatcgcacagcatgcttcgctgatcgcacggccgcgcgcgtgcggctccagctcgccccattccgaatccgatatcggtcggtcaagcaccgcgtcgatggccgaacgttgaatccctgtcagattcgccaggctgtccgtgtccgttgaggctccctccaggatcgagagcatcagtgccttgagcgtgctgaacggcgcgccttgaaggttcgggctgcattcggcatggatcggcagccaaccctcccgggtgagttggtcaacgaactcatgcaccagccgcgatttcccgatgccgggatcgccaaccaagagtgccgtttgccggttggggtcagcgtcgcgcgccaactgcctgagcagcgccgtttccttcgaccggttgacgaatcgcgcaacgcttcgggccctgcgtacccgccagctggagacatccgttgcgcttgcaacgcggtagatgggtaagggctcgctaaatcccttgagctgcctccgacccagatattcaaactgcacgttgccttcggcaaggttctggcaggcctcggacgcgtagatctggttcggttcggcgaccgcctcaagccgtgccgcaaggtgctgcgcggcccccccgatctcgtaaaccttggagtactcgctcgcgaccatgtaggcgaccacgcgccccgaatggagcccgacccgaacctggagccccgggtcgcccaaacccgcgactcgtcggaccaactcgatcgccgcatggcaggcgagcggcgcatggttgtcgtcagcgaccggcgcgccaaataccgcggcgagcccatcgccgagctccttgctgacgatgccgccaaactggcgtacggcgcctcgcatcgcgatcagggccggctccaggcgcgagacggccgcttcggggtccaaatccgcgacgagccccgtcgagtcgaccacgtcggcgcgaaggatcgtcacaaatcgttgttcgctatcggggtccacgcgcttagctacagcagcaccgcatttggcgcaccaattgtcgtccgctccgatcgtcgactggcatgcaaagcaaagcattcccctgctctcaaaggctactgcggtatcgccggctcccccggtgagcagcctagagtagagattacccatcgggacatgcttatcaatccggacgtgcagcccgcccgcatccgcgccaatccgggaagttgttgaactggacgagatacagtcttgagtggtaggtcgaagcacgaccgaaatcggacggcggaactggagctgcaagacctattcgttcgacgtaccagcgttgcataacttgcgtatagccagagcaatccaaagttgcaatgaaagggcaatcttatgggcggaagagtattcaacaatcagcaatttaaagatcacatcaacgcgcactactatcctttgcagaacatgatcaagagcgtcgcaatacttaaggcgtcggatcacatcgacatcgagacgctggaatatggccagtaccagccgatcctgtcgccccgggaccagtggccgggcggaagcggcaagcggtggcagcgggagatgggcaaggcgcggctggatctcgccacgcaggcaagcactgcagccctctccaaggacgagcccggtgtcgttccgctaacgaaatgcgccctgctggatgccagcgtgcgcaagtgcttcaactccgaacccccgatcccgatcaagattgacgtcaaggagcaggacaagaacgcgccgaacgccgatcggcacgacatcctgctggtctgggaacatgcaaatggcgacgatcagcccccgacgcttctcctgttgacgatggtctgcccggcctgatccgggcacgggccgcgcgtcgctcgctcgggcgtatcgagcccgagcgacgaccgccgcaagcgaggcctgcgctcgccaatgcccgaaggacgttcaggagcctggcgtccatttccagacgatgtcggacacattgatcggccgcggaatcagcccgatggccttgaagcgatcggcaatcgcctgctggctcctgacaatctccgcatcgaccggcaccacctggtaattcgagcgcgcgacgaagcgcctgatggcctcgatgtcgacgccggtcgcctcggcctgcgcccgagccacctcctcgcgatgatcggcagcccatttgccttcggccgcgaaaatggaattcagcttcgcgacggtggacggatactttgccacaaagtccgaccccgcgatgtagaacgcattcggcttgtgcacgtccttgtcgaaggcgatcacacgcaccttgtccttgatctccgccaaggcgaggtaaggatcccagatcgaccacgcgtcgacgatgccccgggagaaggcgacggtagcgtccgccggcgccagtggtgtcggcgtgatgtcgctccaggaaaggccggccttgtcgagcgccgcaacgagcaggttgtgcgcactcgagcccttgccgaacgcgacgcgcttgcccttgaggtcggcgagcgttttgatcggggagtccgccggcacgatgatcgcctgggtgttgccgtcagacgtcaccgccgccacgtacgtgaccttggccgcgccggcttgtgcgaagatcggcggcgtgtcgccgacgaaaccgaaatcgacgctgccgacattgatcgcctcgagcagcggcggcccgaactgaaagtcgatccacttcacctcgatgccgagcggcttgaacgcgtcctcgacggtgtgacgctggcggacggccggaaacaagccgcccttttgcgtgccgatgcgaatctcggtcggcttgtcttcggcgtgggccggcgcgaccgcaaatgcggacaatgccagcgcggctgcaaggatggtgcgtctcgtattcatgattgccctttcatggcgtgctggagatcgatgacgacttggcgcggacctggcggcgctgcaaaagcgccctcaccgcgcgctccgccgcgcgcgcggaaccgaaatagtcgccgtcgagaccgtcgaaggcgcggtcagacgagaagaagcagaagccacggctgtcgccgacgacgatccccgcggttcgatccgagacttcgatgacgtaggcttgcggttgagggctttgggcttgggagatctgggcttgggacatgcgtgctcacgcgccgaagacggcgctcctgtctgactgtcgggtgctctggattatgaagcgatcaacaacagacgccggtcgccgccgagacacagcgatgctgcatgcggcgtcgcatgtcgcacatcaagctgcggtggttatgtctcattgcggtgaccttgaacgacgcggatacgcatcaatatccgaccgaaccgcaccgcggtcaatgaaatgactgaccaaagatcgtggcccggcgcgatgccttattcgcggcgggtggaaaaacagcacagttttggtgacgtcggacgcggccggcctgaactggcggaaagtggccggccaccgtgtcccggtgcccggccacgatcgctcagggcaggatcggcggatgataggtgaaggtcgccatcaggatcgccgccagcagcatcacgatcgggaagtggatgaagaactgtaccgacgtatagccgatcagatccttcgacttcaggccgaggatgccgagcagcggcagcatccagaacggattgatgaagttcggcagcgtttcggcgatgttgtagaccatcacggtccagccgagatgcgcaccgatgtcgttggccgccttcatgatatagggcgcctcgatgatccacttgccgccggccgacggcacgaagaagccgagcagcgcggagtagattccgaccaggaacgagaacacggtcgagttgctggaggcgccgacgaaccagtgcgcgatggtgtccgatagcgtggtgccgctgctgttcggcaccttggtcaggatctgcgcgatgccggcatagaacggaaactgcagcagtacgccggagacgctcggcatcgccttggagaacgactcgatcaggctgcgcggccgccagtgcagcacgataccgagaatgaggaagacgaaattgtaggtgttgagtccggacagcgtgatcagcgggttacccgactggaaggtctgccacagccagccggcggcaagcagcgcgatcaggatcgtcagcagcggactgaactcgagccagtcgcccggacgcgccggcttcctcggctcgatgcgatcatcgccgagcgcgacgtcgagatcttccgccgtcttcgcctgttcgggcgcgggcgtcgtgaaatagcagatcgcggccgagacgaccgtcaccatcaccacggtgaccatgttctgccaggtcaggatggtctccgagaagccgatcacgccggtgatcggcagcagcgacgccggaatgctgccggcgttggcctggagctgcgcggccgatgacgtgatgccgagggtgaagccgcagccgagcccgagataaccggccgcgccggcggcccgatagtcgagcctgatgtcggtgcgtcgcgcgatctcccgcaccagcaggccggagaagatcaggctgaggccccagttcagcagcgagaggacaatgctgagcacgccgacgaagaccaccgcgccgcgtccggtcttcggcacgctcgcgagccgcgccagcacggccgccaccggcggcgacatcgccacgacatagccgccgatcgcgaccagcgccatctgcatcgtgaagggaatcagattccagaacccgtcgccaaaggcgcggctgacggcgagcggcgaaccgccatgcaggatcgcgcccgcggcaaccgcaatcacggcgatcaggacgaagacatacgcatccggaaaccagcgctccgcgaacgccaccagagcctgcgaaaatcgcgccatgatgttatccgcgacgggcttccgcaggctcaaggtctggtcgtgcgttgcattcgtcatcaatctgatccccttccggtgatgcggttggccgtcaatcgtgtttggtcatcaaagggcgagcgtgaggtcggtaagcggcacggcctggcaggcgaggcaacgtccctcgccgccgtcaaccgggccgagatgggtgaactccccatcgacgacctcgaccgcgcagctctcgcactgcccgacccggcagccactcggcagcgcgacgcccgccgcgctcgccgcgtcgagcagcgtgccctgctccggtccccacgaaaagctctgcttgctgttggcgagccggatggtgcgcggcgcgaggttgctcggcaccgccggcggcgacacgaagctttcggcaaaaatgtcgaaccgcggaatgccgagtaccgctgcggcctcgatctgcgccgcgacgaaatccggcgagccgcagatgtagaccagcggccggcgcgccagcagcggcttgatctgttcgagatcgatccgccccttgcgcaacgcaggcgagccgatctgatcctgcgctaagggcgccgaatagaatgtcaagcgcgtcagctccggaatgccgacttccaattccgcaagccgttgcgcgaacggatgctcgtggctgctgcggcagccatggagcagcaggatctcggcgacgcgatcctgttgcgcaatgcgttgcagcgtctcgagatggctgatgaacggcgtgatgccgatgccggcagcgaggaagaccagcggccgcagccctttcaggggcggggtgaagacgccgcccggcggctccagcagaacctcgtcgccgacggcaaggccatgcaagcgatccggcatgaagaacggcgcatcgccgcactttacttcgtcgaagaaacgtcccttcaccgcaatcgacaacgactgcggcagatcgctcggcccggtcagcgaataagcgcgcgcctccgttgcgcccggcaatgcggtcatcacgtgctgccctggcaggaagtcgggcagcggaccgccgtcaagcggcagcaggctgagggcgacgacgttatcggcctcggcccggcgcgcgccgaccacgaaccgcctctggccgctccagacgccgcggctggcaacgccgtcacgccggatatcgcagacgatggcgcgcagcggcaccgagccgctgaccggatcgcgcgcgtcgtcatgcagcaccgcgttgatgttgcgcgtgagggcgcctgccgcagccgagcgatcgcggccgagcggcggacaatcctcccaccagccgaactcggcgacgacgacgcgctcgtcgagcgccgcgttgaggcgcaccttcagccgcaccccgccgccctgtgtctccaccacggcccagtcaccttcgaccagcccgcgctgcgcggcgagctgcgggctgatctcgacggccgggtcgggcgacttccgccgcagcgacgcgacatgccgccaggaggagtgaatgaaccagccgctcttggcggtggacagcacgagcggaaagcgatcgtccgcggccgtcgtgagcgggctgccgaccggttcgacgtgatcgggcaacggatcatgcccgtgtcccagcatcagttccgaatagatctcgacacgccgcgtcggcgtcgcgaagcccgccgccgtgccgtcctcgcgggtgacggcgtacttctcgtcgcggaaggcctgcgggaagcgtcgtccttcgggatgaccacgcaggtcctcgacaccgacgccgagcggcgccagctgatagttccagccggcctcgatgtcgccgccgaagaacagctcgtgcatgccgagcttcagcgcaagcgcggcggcaatctcgtaatcggccttcacctcgccgaccggctcgaccatgcgcgggcgaaactgcacggtctcgaccgccgcctgcgtgatctcgaacccgatcttgagcgcgtcgcgctcccacggcgtgctcgccggcagcacgaaatcggcgctctccgcggtcgggttcatgaacatgtcgatatgaacctggaattccagcgcgttcagcgcggccttgttgcgctcggaatggccctgcgagacgacgaagttggtgccgaacgcgaccagcgcgcgcacgcggtaaggctcgccctcgagcaccgcccggctgaaatcgcgcgccgtgatccagccctttgcgggcggcccgagcggcagttcggcgatgccgagcgctttggcctgctgctccggcggcaggatgttgtagtcgttgagcgcacgcgtcggcggcggaaccggccagcgattgccgccgggccggtcgcaagcgccggtcagtgcgtagagtgaggcgatcgtgcgctcgatcgcggtcgcattggtgtgctggccgacgccggtccaggaatgataggcgagccgcggccgcgtcgcgagcagcgcgttgaacgcctcgatgtccgcgatgggtagccaggtcagctccgccacgcgcgccggcgtgtacggtgcagcccgctcgacgagcaattcgaacgcggttgcggccgagatcatgcggccatcgcgtgcacggaccgacagcacgccgcgcaaccggccaccgctctgctgcgtgtaacgggtatcacaaggcaccggcgagcccgacgcatcgaggcgaacgaaaacgtccgccgcgccatccggccacaatgcatcggcgcgcaggaaacgcccggtcgcgcgatcgaccagcagcgatccattggtccatgcgtcgacgaagtcagcatcgaagctgccggtcgcgatgagatggcggatcgcgcccatcgccagcgcgccatcggcgcccgggcggatgcgaagccagaggtcggcctgctgaccggagccgttcggcttgggatcgatgacgacgaccttggcgccgcgccgccgcgcgtcggcgatccgcgtcgcctgggcgagccaggtgcgcgcggggttgtggccccacaggatgatcgcatcggcattgtcgtaatcgggaaagccgatgccgcgaccgaaggtcagcgcgtgcgcaaaatccttgtgccagccgcagatctcgacggagtagatcaggttcgggctgccgaagccgcggatgaagcgctcgacccactcgaagctgtcgaccatcggcgtgccgctcggcgtggtgacaccgaacgccaccgcctcggcgccgctctcggcgcggatcgcgccgagccggttggcaatctcggtcagcgcctcgtcccaggacacctcgacccagcccgggtcggcggcaccgcgcggacgcgtccgcttgagcgggacggtcagccggcgcgggctggcgacgatttccggagcggcgcggcctttggcgcacagcgcgccgccagtcggatggttatttaatacctctacgctgaccaagcgtccgtcctcgacgacggtgacggcaccgcagcgcgaacgacaaagcgtgcaatagccggatatccgctgtttcaccgccgcctcatcgtcaagtcagcccttgtgacgcattttggtaatgcgttacacatttacgtcatacgctaccgcgcccgtcaaggctaagtaataatcagcggacgaatcgaagttcccagcgagaagcggctgcgaccacccatggaccaaaatttgcgagaacaggtgctgcagcgggtgcgtgccgaaatcatttccggccagagcctgcccggcacgatgtattcggtgccgagcctcgccgcgagcctcggcgtctcctcgacgcctgtgcgcgaagcgctgctcgagctcagccgtggtggcctggtcgagccgatgcgcaaccgcggcttcaaggtcgtcgagccgacgctgaccgagctgcgcaacctgttcgacatgcgcgaggtgctggagctgcacgccgccgtgctggtcgccgccaatccgccaaaggatttaccggcggtgcgtggctgggccgaccagatcgccaaagccgtcgagaccgacgacgtccagctctatcttgaggccgaccgcgcctatcatcgcgagttcatcgccgccgccggcaacgagctcttgaccgagatggtgatgggcctgcgcgacaagatgcggctctatggcatcagctcccgcgccggccacgagcgacagctggcctcggtgcccgagcactaccggctgatcgaactcgcgctcgccggcgagaccgaggcgctgccggccttgcttcgtagccacatccgctcctgggagccgatcttcgtcgacgcattgatgcgctccaaggagcacgcgcgcgagccgctgcggcaggcgcgtgggtagccacgagcaagatagacggctggccgcggtgagcggctaatcgagaatgctcttgtactgttccgagaagacgtcgcggccgatgatcagccgcatcacttccgagcttcctgccaggatccggttgacgcgcgcatcggtgaacatccggctgatcggatattcgtccatatagccggcgccgccgtgcagctgcacgccgaggtcgagcatcttccactcgacttccgacgacatcatcttagccttggcgcccatgttgctggtcaggcgtccggcattgtgctcgacgacgcagtgatcgacatagacctggacgagatcgatctcggcatccatctccgccatgcggaactgggtgttctgctgctcggcgagcggccggccgaacagcttgcggtccatcacgtaagcgcgcgtgatgtcgaatgccttacgggcattggcgatcgatccgaccgcggagatcagccgctcctcggcaaggccttccatgagatagtagaagcccctgcccggctcgcccagcacgttgcctttgggcaccttcacattctggaagaacagctcggcggtgtcctgcgccggcatgcccatcttcttgagattgcggccgcgctcaaaaccgtccatgccgcgctcgacgatcaagagcaccatggcgtgcttcttctcggcacttgcgagcttggccgcgacgatcacgacgtcggaattgatgccgttggagatgtaggtcttcgagccattgagcaggaagtgatcgcccttgtcctcggccgtcgtccgcatgcccgcgaggtctgagcccgctccgggctcggtcgtcgcaatcgccaggatggtctcgccgctgacgcatttgggcaggaagcgatcgcgctgctcctcggtgccgaaacgcttgaaataggagccgaccaggcggctgtgcagcgtgttgaaccagcccttgcagcccgagcgcgcggtctcctcgatgatgatctgctcgtagcggaagtcctcgtcgcccatgccgccgtatttctcttcaggccagatcatcaggaagccgaggtcgccggccttcttgaacgcattgcggtcgacgatgccggcctctcgccactcttccatatggggcgcgatctcgctggcgagaaacttgcggtaggaatcgcggaagatgacctggtcttcggtaaagctgcgcatcgttcacccaatcacgctctgcggcgaggcactgacgaaaaaatggagcgtcggttctgcttcaacaaaaccgacgctccgtcatcgaaacagtcgatgctctacttgcccttccagttcggagcgcgtttttctgcaaaggcagccgcgccctcgcgggcatcctcggacacgaagaccggaccgacgatctcctgctgcttcttccacatctggtcttcgggccagagacgggattcgacgaccacctgcttggacgccttgacggccagcgggccgttggcaccgatcgctgccgcaagctcgagcgcggcgtcgagcgccgggccatcggtgacgcggttgatgatgccgagttggtgagcacgctcggcgccgaagaactcgcccgtcagcgcgaactccatcgccacacggatcggcatctgccgcggcatgcggatcaggccaccggccgcggccgccagcccgcgcttcacctcggggattccgaacttggcgttgcggttagcgacgatcatgtcgcacgacagcgcgatctccatcccgccggcgagcgcgtagccatcgaccgccgcgatcagcggcttcttcggcggcgcctcggtgaggccggcgaaaccgcggcctgggatcgacggtcgctcgcccttcaggaaccccttgaggtccatgcccgagcagaacgtgccgccggcgccagtgatgatgccgacgctgagcgtatcgtcggcatcgagccggtcgatcgccgcagccacgcccttggagagcgcgaggttggcggcgttcttggcctccggccggttcagcgtgatgatcaggataggtccgcggacctcagtgaggaccggagtttcttcggacatcgtttcgtctcctgttgccgtgcttatcgtttgagcatgatcttttcggaaaaccgcttcgcacttttccggatcatgctctagcgcggcgccatgcggatggcgccgtcgagacggacgtcttcaccgttgaagtagccattggtgatcatcgtcaacgccagatgcgcgtattcttccggcatgccgagacgcttcgggaacggcaccgacgcgctgagcgcagccttgacgttctcaggagcgccctgcagcagcggcgtgttgaagatgcccggcaggatggtgttgacgcggatgccctcggccatcaggtcgcgcgcgatcggcagggtcatgccgacgacaccggccttcgaggcggaatacgccgcctgccccatctgaccgtcctcggcagcaaccgacgccgtgttcacgaccgcgccgcgctcgccgtgctccagcggagccagcgacagcatgccctgcgccgacttggcgatgcagcggaaggtgccgacgaggttgatctggatgatgcgattgaaggcgtcgatcgggaagtgcgtgggttcgccggtcttcttgtcccggcccgcagtcttcaccgcattgccggtgccggcgcagttcaccaggatacgctcctggccatgcgccgcgcgcgccttggcgaagccggcatcgacctgctcgtcggaggtgacgtcaaccttgcagaacacaccgccgatttccttggcgatggcttcacccttctcttcgttgaagtcgaagatcgcgaccttcacgccgtgcgcggcaagcgcgcgcgaggtagccgcgccgaggcccgacgcgccgccggtgacgacggcggcgaccgatgaatcgagtttcattgcgttatcctttcgcgatcagaggcgttcgatgatgatggcgggcgccatgccgccggcggcacacatggtgaccagaccatagcgtccgccgctgcgctcgagctcgtcgagcgcggtgccgatcaggatcgacccggtcgcgccgatcgggtggccgagcgcgatcgagcctccattgatattgaccttctcgcgatcgaggtcgaggtcgcggatgaacttctcggcgacgaccgcgaacgcctcgttgatctcccagacgtcgatgtcgttcttggtcaggccggccttggcgagaaccttcttggccgccgggaccggcgcgttgagcatcaaggtcgggtcatcaccctggttggcataggccacgatgcggccgcgcggcttgaggccgtgcttctcggcatattccttcgacgtgatcagcaccgcggcggcgccgtccaccacgccggagctgttgccggcatgatgcacgcccttccactcgaggcccgggtagcggcgctggatctgcttcttgaaggtcgtgccgttgccgagatcgaaatcggcaagctgctcgaagctcggcttcagcgaagccaggccttcggcggtggtctcggggcgcgggaattcctcacggccgagggcgatgctgccatcctcgttgaggaccgggatcaccgacttggcgaagcggccttcatcgattgcccgcttggcgcgctgctggctggtcagcgccagggcatcgcaggcctcgcggctgatcccctcgcgcgtggcaatggcgtcgccgcacacgccctggtgcgactggggatgaatctcgtccagcgccgggttgccggaacccatcatccgcgccggctggccggccttggagcgctcggcagcgagggtctgctgatagctcatcatctcggtgccgccggcgatgacgcaatcttccatccccgacatcacagaggctgccgccaggttcaccgaggtgatgccgccgccgcagaaacgatccagcgtcgtgccgctggcattgatgtcgtagccggccgcgagcgccgacatgcggccgagatcgccgccctgcttgccttcctgggtcgacgtcgaccagatgatgtcgtcgacggtcgacgtatcgagcttgttgcgcgccttgagcgcggcgagcacggtggccgccagatgctgcggatgcaggtgcgacagcgcgcccttgcccggcttgccgatcccacgcggcgtgcggacggcgtcgatgatgtatgcttcaggcatgcgtttccccctcgtttcagatgtctcgctcaaattgactcgtgccgacgtcccaaccgttccgctgcgtctgccgcttcggaatgagatgggtcgtcagcggtgtggcgtcacggctcggcaatcgcgttgcgctgatcttcgaaatactcgaagcgcggcaccgtgcggagctcccgctcgtcggcacaggctggcttgtcgcccccttgcgcgaacaacggcgcgccgggtgcggcagcgtgcggaccgagagcatatttctgctcttgcggcaggtagatcaactggccgatctgggtgagggtcagcgtgagacgggaaaccgtcgatcggggaagaccgcaacgatcggcgatttcgcgattgccaaggcgtatgcttcggccttcgaagcaacgcacgatgtcgaatgcgcgcgacaccacctggatcacgcgccggttgtccgtgccggcggtctcttgcgccatcagtacctcagatcgacgtcccatcgtttacgcctcactcctcattttgcgtacgggtgaatgaagtccgccctggtttgggcgggacgagccgatccgcgacgtcgctgtcgcgcgtgcaacaccacgcggcgctcgcgcgagcggacctgcagaaaggagctgaccgcaggcggcgcctggtcttccagaccggtgaagccgcgaccgcggggcaagcagcttctggtatcgatggccggccggcatcaggcggattctttccctaggattcagaccttaattaattgattaattagtcaggtgattaaagtgggcgcctccccctgtcaactgcggttgtcgcagggcgccccgcgcccggatggcacctcgggcatccggcagccagctaccgatccagttgcggccggatcagcgttcgacgttcccgcgaactctgctgcttgcaccgcgtatcgctcggcgccgaaaaccagacgcccaacctgaccgggcagaccgacaccgcgcctggagtacacctgctcgatgaacggcaatcgtgtggccggcgcgagcgcgcggaaatcggcgagcgcctagtcgcgaccggagttggcgccctcgttcccactcatgtagctggtgtgctgtgcgagataaccttgcgtcgtcgcatccgagcgggatcacaaacggattcggcagccgcatcgtatggcaagcgcgagccggaagcccagagccgggagcgaacggccggcccgtccgctcggaccgcaattgcacgacatgcgtatcctcgcgcgcacccgcatcgcgacaccgcattatatcggtttttgatggggcgataaattccgatagttcgatcaggcgccgctaagtctttgctcattcaaagtttaccaaagtttgatgtttttgttcacgacgacggtccgcttgtccgagtcgaaaaggcacaaccggccactagaacgagtcgtttgaaggacgcctgggaagctcgcggaccgggaacgcgaccagcaagattctcgatcactgttgaaagattcgcatgcgctacaacggtgggaagcgacaagtcgggcaggccgcgcgaatccgagcggtcgtgctcttcgtagccctggcatccggttgtcaaagctccgcccaggccggcacgtcgaccgcgaatttgaccgtgcagatcaccattaccgcatcctgcacaatcaacgctgcaacactcaatttcgggagcgtcgccggaacaacgcttgcgaccaccctgcaatccggcagcacaacagtctcggtcacctgcaccaatggcagcccctactccatcgccatggataatggagcaaacgcgtccggcagccagcggcggatggcgaacgccggaaatttcatcagctacaatctctttactgatgcggcccataccaatccctggaccacggccaccagcagcacaacctgcacgaccacgaacggctgctttctcggcaccggcaacggatcggcgcagacgatcaacatctacggtaacgttcctgctaccggcaccgcgccgaacaccggcacctacacggacacggtggtcatgaccatcacgtactgaggaaaaggccgcagcagcggccgatgttccgttgcgttcgcgtatcgacgaattgccttccggctcaattttcgaaatcgatcggtattgcgatgcatcacaattcaaatttgctggccgcatttgccgtaagcctggcatgcatgggcgctgcgcatgccacagcgcttcgcgttgaacccgtcctcctggaactgaatgccccggccgcggcggcgtccctgacgctgcgcaatgatgacgatgccgaggtcgaggtccagacccgcgtgcttcgttggtcgcagtcggaaggcaaggagagccttgaaccgacaacggacgtggtggcatcgccgccagccgtcaggatggcccctcattccgactacgtcgtgcgagtcgtgcgggtgtcgaagcaaccgatccagggcgaagaaagctatcgtgtcatcgtcgaccaactaccgcgagcagtcggcaggcaaagaggtaccgtcaatctcctggtacgacagtcgatcccggcgttttttcgcggccgcgagatcagccggccagaggtctcctgggcgttccgcaccgaagccggtaaactgaccgtcgtaacccgcaatgccggcgacgagcggctacgaatcgcaaacctgcggctcaaggattccacgggagccaccctgtcctttggcaacggcctgctcggctacgtgctcgggcggtcctccatgagttggaccacgctgaaatatcctcagggttttggatccggcggatccatctctgtcacggccgaaacggacaagggcccgactcatgcggttattgagtcgctggctcgtcggtagaaggggctcagcagttgtgtccatcgcagcactactcggcatgatcctctatgccgggcgtgctcgcgcgggcgaaaaccagacaaacctgcaactcgacgtcgtgatcaactcggtgcctgcccgaacgatcggatcgttcgtccggttcgataacggtcgcatcggaggaacgctggacgaattggagagcctcggactgcgtccgcgccggccgcttcgaccggacgagatcatcgcgctcgatgatatcccgaccctgaagtatcgatacgaggagagaacacagcggatattcatcatcgtcgacgaagccgggcgcaagccgcagctgcttgacgcaggcggctccagtggcaacgtgccgagggcgcaggccgatcctggcgcggtgctgaattatgatctgctgacttcaaccagcaacatctcgacgtcgagatcgatcgggctcgccaacacatcgctcttgctcgatgcccgcgcgttctcgccttacggcaccgccgaacagtcggcgatcatccgcagtggtccgcagcagcctgcgcaggcgacgaggctgaattcgtctttccagtattccgaccaggaccggatgatcagctacgtcgcaggggatacgatcaacggcggactcgcctggtcgcgtccggtcaggatcggcggcttgcaggcccaacgcgattttaccctgcggcccgatctcattaccgcgccgctcgcgacgatcggtggtagcgcggcagtgccgtcgaccgtcgatgtctatgtcaacaacatcaggacattttctcaggatgtcgcgtccggccctttcagcgtgaacaacgttccgctgatttcgggcgccggcacgacgcagctcgtggtgcgggattcggcaggtcacgaaacccggacctcggcgccgttttatgcgaacgcgaacctgcttgcgcccgggctaagcaactggtcggtggaggccggattgccgcgcctgtcctacggttcgagcagcgacgtctatgttggctcgccagtcggatccgcgaccctgcggcgcggcatctacgacgggttgacggcagaggcacacgccgaaggcggagccggcgtcatcaacggcgggatcggtggtgtcctgaggaccgggacgatgggtgttgcggccgtggccctggccggcagcggcagcggcagcggcacgaaccgcggcatgcagacctatgcatcctacgagacccggctgttcgacgtgagcatttcggccagctcgcaacacaccttcggcacctatgacgaccttgcctcggccactgcgcgattgcagaacatcgtgacgttcaacggcggcctgcagaacctgaacggtctgtttaactacctgcccggcggcgtcgcttcgctgtcgaactcgtttgcctatgtgacgggcatctatggcagcgcccgtgcgccggtcgcactcgatcggatcactttcagcaccccgatgccgttcgactccagggccagcctcagtgcaagctttgtcgatctgcgcgatgcctcgggcaatcgttcgaatattgtgacggcttcctactcgcgttcgttgccgtacaatgcgtcgatattcaccaccgtcttccacgatttcggtaccaagaagaataccggcatgtttgccggtttgagcatgccccttggcgactctgcttcgatcacgagcggggtttcaagcggacggagcggtacagtcggtagcgtcgatgccgtcaagtcgcttgggccggagcccggcagttatggctggcgcgtgcacgattccgaaggctcggcaagttaccgggaggccacagcttcctacaggtcgagctacggcaccgtccaggccggcgcaagtcaggccggatccggcgcggtgggatcgctggaattgcgcggttcgatcacgaccatgggaggcggcgttttcctttcgaactggatcgacgacagcttcgcggtggtcacgaccggcgtgccggatgtcgaggtcctcaacgagaaccgccgggcgggcgtcaccgattcccgcggcatgttgctgataccgacgcttcggtcctaccaaaacaacaagatcgcgatcgatccgacgaaccttccagtcgacaacgaagcggcaacgacgcatgacatcgcagctcccgccgatcgcgccgggatactcgtcagattcgatgtccgcaaggagacgacggccgcgctggttacctttgttggacctgacaatcgtgttctgccggccggcgccgtcggccgcatgaccggtggaggagagtttgtcgtcggctatgacggacaggcctacatcaagggactgtcgtcaacgaacgaagtcgagatcgacctggccgaaatgcgctgccgtacaacgtttgggtttgtcccgaagcccggcgaacaggtccggatccccggagtggtgtgccgataatgcagtcgttcatccgcgaacagcggctccgcaatttaaccgcctataatcagttccgattaactcgcattgtgagattgagatcgtggtcatcggcttgaagcgaaccctgctcttggccctgttcttggccctgctcctgcagcttgcggcatcattttcggctcacgcccaaagctgctccgttacctcggcgtcgggcaactacggatcggtcgacattctggccggcggcgccgtcgatacgacctcgacctttaccgtgacgtgcagcggctgtgccctcggctgcacggtcaatgcgtgtgtgcaattcaaccagggggcgcccaacagcagcaattcggttcgatcgctgggaagtggcgcgaatgcggcaatccacgagctgtattcggattcagggcgcacgcaggtctggggatcctggggatacggaaccaccgcgtatggctccggcggcgtcagcatcaatctgagtcttccacttttgggcggacccgcgcaacaaagtctgactgtctatgggcgcttcctggccaatcagcaggcaacgatacccggaacctacgtctggagcacgacgtctccggtcgtcgcctacgcggcctatcttctggcaagcccgaattgctcatcgaatccgggaacgacgacaaatgccggcgcctcgccctggacggcgacaatcgccggaaattgcattgtttcgacaaccccactcaatttcggcaacgcttcgctgttgacgtcaaacattgacggcgttggaacgatttcagtgaagtgcaccaatacgaccccgtactcgatcggtctcgataacggagtgaacccaagcggcagccagcggcgcatgcaggcaggttcgagcttcatcacatacaatctctataccgacgcggcccggaccagcgcctggacaagtacgacatccgccacgacctgcacttctggtgccagtacctgtgtccttggtacaggaacagcgttgaaccagaatgtttcagtctatgggcgcgttccgccgcagacctcaccacccgccggaagctacgcggacaccatcgtcgtcaccgtgaccttctagccagcctggttttccggatggagtagctgggcctggttcgcgcaccgtgggaatgggcgcggcgagaacggcgatagccggcgtgcatgaacgaccgaggttgtaccgatgccagcgcggaggctattcccgagcaactacggcatcgagccacgcgcagttcagaggcggcacgactggatccggcacgcgtacgccgcgctgcgccgcatcgatccgcatgtcacgtaggcgcttgcgctgttcatcgggcatatagagccgctcatgcccccagagcgatggcccatcaaacgtctcatgcggttgccaggtaaccgggtcgatgacgcgagctccccaaccgtattcgatgaagaagcccgacggcgtgtttacgtaaaacgacgtcatgtgatcgttggtgtgtcgtcccaaggtataggcgacccgcccgtcatccagctgcgcaagatcgtagcattgaccaacgtcgtcgagggtgccgagttcgaccatgaagtggtgcagcgctttccggccggagcccaccatcgcaaagctgtgatggcgtccgttcacatggaaaaaatacaggctgtagggcttgagcccgaaatcggacacgtggaagccgagcacgtcgcgatagaacggcagcagaagatcgacgtcctcgacgttcaggacgacgtgtcccattccgagggcgccggtgcggaagccggagatcggcctccccggtcggaacggatccgtcgcgagggacggctcgcagaacgcctcaagccggttgccagcggggtcggcgaactggatcaagtcgcgaacgtgccgttcatcggccagcgcgcgcgatccgcgcgtgactacgacaccatggctttccaacctggcggcgagacgatcaagctccgctggggtcggaacttcccagcccatcaccgcaagaccggagtcgttgccgccgtcgacgatcagacgttgcctgcggtcgtccatccggaaagcccgcgtctttccgccgcgatcgatctgctgcatgccgagcagcttcgtcgccatgtggctccactgctccagctgcgaggagcctatgccgatgtagccgagtgcggaaatctccatacaggttccttaagtgtgttcttcgcacgcgttggtcgcgcgcggccccttcgccggagtttgatgccgacgcggcgcgatcgtgcccaaagccttgcggccgcatcgcatttgcagcatcgtgagcctgcgtacccggcggcacaaggacgaaaatagaaatgtccaaggagcggacgagcgacggacggccgaaagcctcggcgggggtccgcgccttcaagcgcgggctggacgtcctcaccgaggtcaacaggtccggcggcgtgagggccgcagacgtggcgcgcgcgctcgatcttccccggccgaccgtctaccggctgctcgagaccttggaggaactcggctatatcgctcgttcggcgagcgacgaccgctatcgcgtgactcggttggcctccagcctcggggacggctacaatcccagcgtcgtcatctgccaggcggcggcgccctacctcaacgagttgagcaagactctcgtctggcccgtcgacctttccacctatgagaacgccgcgatggtggtccaggagaccacccattctcgcagtccaatgtcgatcgaccgcgggatgatcggcaaacgcctacccatccttcggacatcggccggtcgagcctatctggcggcctcggcggagcgcgagcgaaacttgatcgtcaatcatttgcggcggatcgatgaggcggatgaccgccccttcctcggcggcgactggctcgaacgcatgatcgcggagacccgtgagcggggttacggagtccgcaacgagggagaatacaatcccaagacggcatcgatcgcggtgccgatcgtccgggacgaggccgtcttcggctgcatttcgatcatatggatccgttccgccctttctctagaggacgcggtttcgcagttcgtgatgccaatgcgccaagctgcggccgcaatcacgatcgacggctaattcacccttacgggtagagaagccaggccacgcagcacgttgttcagggcgagcacgggttcaccgatatcgaagctgcgcaccttctcgacgaggacttcgagaagagccgtcatttcgagacgggcgagatgcaggccggcgcacatgtgcgtgccgtttccgaaaccaagatggtcgttggcgcgccggcgcacatcgaacttctccggatcttgccatttgcgctcgtcacggttggccgacgcatacagcagcagcacccggcttcctgctggaacaagcgcatcgccgagggcagcgttcgaggcagcatgacgcgtgaagccccggatcggagactccaggcggagggcttcgttgatggcattcgggatcagcttaggatcattgcggacaagctcccattgatccggatgtctgccgaacaacaggatcagattagccgtcgcgaagatcgtcgtgtccaggctgggcccgagatagtcccgcatcaggacgggacaacgctccggctcgacctcgccacgatcggcggcctcgaaaatgcgcctgccccagctcccgggcagcaaccgttcgcgcatatccggaacgctcaggtaggagcgcatctcgcgaaaatccgtcatggcggcgcagccacgttcgttcatcgtgcccagcacgttgaacgtggccgacgcccacctgagcatgctgccccggccgtagtcttcgaggccgaccaacttggacacgatcgtgagcggcaagtgttgcgccagatccgtcaccgcgtcgaattgctcctgctcgacgaggtcatcaacgagccgtcttgcttccgcccggatctgtggaccgatctcttcgagagctcggggcgaaagaggagcgccgatgatcgcccggagccggtcatgcaagggggcgtcgctcgcaagagtcgtgccccgcgccatttcgttgacggtgccgttggctgcgacgccctccgcggacgagaagacggtcggattcctcaacgctgctcggacgtcatcgaagcgacccacggcatagagatcgtgtcgaggaagccagacggcggcgccgcgcgccctgatagctcgatagtgaggataggggtcgcgaagaacctcgtcgctgtagagatcgacgtcgtaggtgggcgcgtccagatcggctatgctcatgatgttccgtccgcttggatgctggtgtcagcgcaccgcgacccactcgcccttttcgagcttgcccagaaccaaagcactctggtccaaccccgtgtggtcgtcgggtccgtaattgtagacgcctcgtgacccggcaacgcccttcaaggattcgatcgcgcctctcagggcctgtctgaactcgggcgtacccggctcggcggtcttcagagcgatcggggcggccttctcgagcaacagcaaggcatcgtaggccgttcccgcgaagatgttgcggcttcccggcccgaacttcgcttcgtagcgctggatgaactccagtgcggacttcttcgcgggatattcgtcggggaaggacgcggccccgacggcggggctcagtggaacgaagatgccgtcgccttgggcacctgtgagcttcttgaaatcgccgaatgtcgcgccgagcgtgccgtagatctgaccatcgtaccccttctcgcgcaattgcaatagcggaagcgccgccggcgcacccgaggccgcgatcagaacggcatccggaccggctgcgaggatcttcaatatctgtcccaccaccgtcgtgtcggtccgggcgtacttctcgttcgcgacgagctcgatgccggcggccttggccatgtcggcgctgaccttgctccaggcgtcgccataggagtcgccaaaaccgatcagggccagcttcttcaccccggacttcttcatgttcgcgaacagcggcgttgcttcgtgatcgtcgttggttgtggtcttgaacacccaacgccgcctggcgtcgatcggtgcgacgagcgcattgactggcgcgagcgtgatcataggcgtctcgtactcgaccgccggctcgatgaccgcgaaggagcccggcgtggtggtcggcccgatcagcaggtctatcttgctctcctcatgcagcttgcgcagcgccgacacggcggccgtagcgtcagaagcttcatcgaggaatagatagttgaccttcttccctgcgatctcggcgggaccgaaggccgtgccgttgcgctcggcgttgccgatggctgcggcggggcccgtcgcggacaaaaggatcccgacgttgatgtcggcggcaaagctcggcgcagcgaacaattgcgcaacaagacatgcactcagcacggatcgcagcatcgtcgtttcctccgccttggactgcctcggcagaccggccttattggctttgcttcctccctagcgaaaccggattgcccgcgagtagcattatcgcgaagctgtccggctggcggacaagccaccgagcagcgcagcctcgtccgctgcgcggacagttggcgactcgatgttgaaagtggagcgcggctgagaaacagatggcgtcatgcaggatggatccgcttcccagagctatgatgtcgtgatcgtcggccgcgggcccgtcggggccacgctcgccaatctgctcggcctatgcggcgtgcggacgctagtgctggagcgcgaagcccgcgcccaccatctcccgcgcgctgtacacttcgacgacgaatgcatgcgcgtgttccagaccatcggtctggccgatgcgatcctgccgcaggtgatcctcagccccggcatgctctttctcgacgccaacggccgcatgctgctggattggtcgcgtccgctgacgctcaccccgcagggctggaatctcagctatcgctttcatcagcccgatcttgaggaggtgctgatcggcggcctgcagcgttggccgcacgtgacgatgcgcaaccgatgcgacgtgttcgctctcgaccaggacgagaccggcgtgcgcgtgcgctacgaagacctctccaacgggcagctcgccgaggtgcgcgctgggtatgtgatcggctgcgacggcgcccgctcgctggtgcgccgcttcatcggctccggcatggacgatctgggtttccacgaacgctggctcgtggtcgacgttctgctgaagcgagctcgcgacgatctcggcgattacagcctgcagcattgtgatccccggcggcccgccacctatgtgcgcggcaccggcacgcgccgccgctgggagatcacggttctgcccgacgaggtttcacaagaggtcacccagccggcgaaggtctgggagctgctgtcgcgctggatcacgcccgaggatgccgagcttgagcgcgccgctgtctacaccttccattccaccatcgcgcagaaatggcgcgacggccgcctgctgctcgcaggtgattcagcccaccagaccccgcccttcctgggtcagggaatgtgcgccggcatccgcgacgccgcaaacctcgcctggaagctcagcgcgatccttggccgccatgccgacggccgcctgctcgatacctatcagagcgagcgccagccgcatgtccgcgaattcgtcgagctcgccatccggctcggcggcttgatcaacaccaaggcagtcgaagccggcctcgccgccggccgggctcgcgagaaggcgccagtcaagctcgaggtgaagaagcccctgctcggccccggccttgcgccgtcggatctgcctttggccgggcatctcgcgccgcaattcactatgcccgacggccgtcgcagcgacgacgccatcggctacgcctacgtcctgctcaccgaggccgccggcgtcatcccgtccccgttgcaacgcgcgttcggcgatgccggcgtgtcgatcatcactggcgacacgaccgcgggcgtcggcacttggttgcgcgacaacggcctcaaagccgctctcgtccggcctgaccgctacgtactcggtaccgcccgaaacgacgcggaactcgaacggctcgccgccgccatcaaccatcccacccacgtgccgtccgcggcctgaacacattcgctaggatatcttatgaagctgctttctttcgtcgccgacggccgtgcctcctttggcgccgtcaaggacaacggcgtcgtcgatctcggtgcgcgcatgcccgaatgcgcctcgctacggcagttgctcgagaccaaccgcgtcgccgaagcgaccgcattggtcgcagccaacgcggccgaccgcgcgatcgacaagatcgccttcgcgccggtcatcccggaccccggcaagatcatctgtgtcggtcttaactaccgggaccatgtcgccgagaccggccgcaccgtcaccgagaagccggcgctgttcgcgcgcttcgcctgcagccaggtcggccacatgcagccgatcgtcaggccgaaggtcagcgacaatttcgactatgagggcgagctcgcgctggtgatcggcaaggaaggacgccacatcccggccggccaagcgctcgaccatgtcgcaggctacgcctgctacaacgagggcagcgtccgcgactggcagcggcataccagccagtttctttccggcaagacctttgccaacagcggcagcttcggcccttggctggtgacgagggacgaaatccccgatccgtcaaagctcacgttgcagacccgcctcaacggcaccgtcgtgcagcacacgacgaccgatctgttgatcaccggaatccccgagctgatcacctacatctctacgatctgcccgctggtccccggtgacgtcatcgtcacgggcacgcccggcggtgtcggtttgaagcgcacgccgccgctatggatgaagcccggtgacactgtcgaggtcgaaatctccgggatcggcgtcctccagaactccgtgatcgctgagtaaagcaccggcctggctgactcgctccggtcccgatccggagcgggttgtacccccgatcaccaagcggcgtagtcaggcacgtgccttagaggagtcacatgatcagtaatatccgatcatcgatcgacgatgcgctagaaatctccgcgcaggccgaccgtggtgcgcagccggtcggcccagcgcaccgtgttccgcgcatagacgccgaccgatgcttcgctgaccttgtcactcctgacattggcaaggacgctgcgctgccaggcatcggtcagggccagtgcgatatcgtcgtagcgcgtctgcatcccgaaagtcgtctccatcgaaaggccagcgaaggagccgagcaacgtgcgcgaggcgttgacgccaagcatcacgcggtcgtcatgctgatggaattgatcgccaagcaccggattggtcaggaaacaggtgaagtcgttgaacaggtcgagctggctcttcaccacataggcattgacgcaattcatcctaccgacgccgttgagtagatcgtcatcgcaccaatcccgatggtgaccgcgcctaccagacattgcaggctacgattggcccaggtcagcgaccgtgcggaaaccgcaagcggtaccgcgatgagagtcgacaaggcgcccatcccgagcatcgaaccgatgccaaacagcagaacgtagaaaatcccgtagacgggatctttcgcctgcgcgattgcaaggacgagaagcgcagccgaaccagccatcccatgcatcaagccgaccagcagcgagcgccagcggaaaccatgctgatgttcgtgcgaactcttctgatgggggatcggttcattgacgtggctgtggacatggaagtgttccgtaccgtcgtcatggccgtgctggtgaaaatgcacgccgtcgcaccacagtcgccaaagaacgtgggcacccaggccgaccagcatcacgcccaccgcagtctcgagcgggcgcgccaattgctccggaattgcgtgaccaatcacgatcgcggcaccggcaaagacgaacaaggtcagcgtgtggccaagtccccacgtcagaccgtgcttgacgatatcactgacatcggtccgccgggcagcaatgctcgacaccgccgcgatatgatcggcttcgagcgcatgctgcattccgagcaagaaaccgagtccaaggaccccgaacatgcgctctccgatttcgtttgatggacaagtcccctcaggcgaacgcggattcgcggctcttcacgagttcgccgcgcagccagccataccagtccagcagaccctcgccgctccgtgcggacacctgaaacaccctgatatccggattgacctcgcgggcgttggcgatggcacgggccacgtcgaaatcgacgtgaggcaacagatcggttttgttgaggatcatgagctcggccgcgcggaacatatgcggatatttcagcggcttgtcctctccttcagtcactgagagaatgacgatcttggctcgctcgccgagatcgaacatcgccgggcagacgaggtttccgacgttctcgatcatgacgacggagcctgacgcaggcctcaacgccgcgaggccacgtgccaccatgtcggcctcgagatggcatccagcgccggtattgacctgcacggcaggcgcacccgcagcccgaatccgctcgccatcgttcacggtcgcctggtccccctcgatcacatagagcttgagctcaccctggagatcgcgaatcgttcgctccagcagcgtggtcttgccggctcccggcgaactgaccaggttcagcgcgagaatttcccggcctgcgaaccaggccctgttcttcgccgccagcgcatcgttcttggcgaggatgcgcgtctcgagttcaacgacactgtcgtctgcatgcgagtgatggtcgtgatcgtggccgtggtcatgatgcccgtcatcgtgggcgtggctgtgcctcgtgccatcggcatgagcatgatcgtgctcgtgagcatggctgtgatcatgttcgccgtgggcatggctatggcgggtcccgtcggcgtggacgtgatcatgccggtaggagtgaccgtgctgatgatcgtggccatggtcatgatggtggctgtgccgggtgccatcagcgtgaacgtggtcatgctcatggtgatgtccgtgatcgtgtgaatgcgcgcccatcgtcatcgtctccccggtctgaaggttgtggatggtggctccggtcttgtctccgcacccgcaatgtccgcacatcaggcgatccccgcttcgagttccatgctcttgatgttcaattcctcaccctgcaatcgtgtcagccggtttgaaccgcaggggcaggaagcaaacagcgtttcggtgacgaattcgacgccgcagccgttgcaacgcgctctgccctcgacctgcctgatctcaagcgttgcgccttcgagcgccgttccctgtgcaacggtctcgaagcagaacacgatcgcgtctgccatcacgcccgacaattttccgatctcgagcgtcacacgccggacgcggcgcccttttgcggcatcgccgacgatggcgacgatgttcctgctgatgccgagttcatgcatggcgataccctcagcagatccggggcaactgctcgccaaccagcatgtcgacgattcgccgccctccgaacacggtccgcatagtgacgcggcccggctccccatgatcgatgcgcccaatgatcgcagagcacgcaccgagcggatgcgctcgcatcgccgccagcgctgcgtcggcctgctccggcggcgcgatcaccacgatcttgccttcattggcgagatagagcggatcaagccccaggatctcgcagaatgccttgacttcctcgcggatcggcgtgccgacctcgtcgatctcgatcgcgacccgcgaagcatcggcgatctcgttaaggacggtcgcaagcccgccccgcgtcgcatcgcgcagaaagcggatgccgggcgcggccgtcagcaacctgtcgatcaggccatgcaggcaggcgcaatcgctttcgatcaaagtgtcgagcgccatatcgccgcgcgcgcacaggatcgccgcgccatgatcaccgagcagtccgttgacgagcacgacgtcgcccggcatggccatatcgacgccgagcgcgaccccttttcgaatcatgccgattcccgtcgtagtgatgaacagtttgtcgcacgccccgcgctgcaccaccttggtgtcgccggtgacaatctgtacgccggcctgcattgccgtcctcgccatcgagaaagcaacccggcgcagcacatcgacgcgcgtcccctcttcaacgatgacggcgcaggacagataaagcggagtcgccccgccgaccgcgagatcgttgaccgttccacacaccgcgagctcgccgatatcgccgccgggaaagaacagcggatcgaccacaaatgaatccgtcgtgaacgccagcctgtcgccgtggcttgcaagcccggcgaggtcgatccgggcttggtcttccagcggtgccagcgcgcgattgtcgaatgcggcgacgaacacgtcgtcgatcaggtccttcatcgccttgccgccgccgccatgcgcaagcgtcaccgtgtcgacgttgaccttgccgcgccggcgggaacggataaacggtgcgacgttcataccgcctcctccttgtagcgctcgaccccgccatactggtagtacgccgcacaagccccctccgaggacaccatcagcgcgccgagcggcgtttcaggcgtgcaggccgagccgaataccttgcattgccagggtttgatcacgcccttcagcacttcaccgcattggcacgacttcggatccgcgatcttcgcgttcgggattgcgaatttctgctcggcgtcgaaatgcgcataggccttgcgcagcctgacgcccgaatgatcgatcgagccgagcccacgccactcgaagaactcgcgcagctcgtagacccgcgagacggcccgcaacgccggggcattgccgccatcaggcacaatgcgcgcatactggttctcgatatcggtccgaccgtccttgatctgtttcaacaccatccagatcgattgcaggatgtcgagcggttcgaagccggcaatcaccatcggcttccggtagaattttgcgatgaactcgtaaggcgcggtgccaatcaccatcgagacgtgaccgggcccgaggaagccatcgagctgcaggcccgggctgtcgagaatcgccttgatggtcggcacgatcgtaatgtgattgcagtacaccgaaaaattgccaatgccttctgcttccgcctgaaggattgtcaacgcagtcgacggcatcgtggtctcgaagccgagcccgaagaacaccacctcgcggtccggattgttgcgcgccagcgccagcgcgtccatcggcgagtacaccatccgcacatcggcgccctcggccttggcctgcagcagactcttcttcgagccgggcacccgcatcgcatcaccgaacgtggtgaagatgacgttcggatgttcggcgatcgacacgcagtcgtcgacgcggcccatcggcagcacacagaccgggcagcccggtccgtggatcaacccgatctccttgggcagcatcccttcgaggccgtagcggaagatcgaatgggtatgaccgccgcagacttccatgatgtagagcggccgctccgctggcatccgcatggtcgcgaccagcgcctcgatctccttgatcaagacccgcgccttgccgctgtcacgaaattcgtcgagatacttcatgcggcggctcccttggtggctgccgagccgcggtcgtcggccagcagcgtgtgaaccaggtcccacaggatgtgataggccgcgacgtgacattcctggacacggtggatcgacgtggtcggaacgaccagacagaagtcgaccgcacccgacgacttcatctttccgccatcgccgccggcgagcccgatggtgacgaggcccatttcctttgccttggcgaacgccgacatcagattcgcagaatttccgctggtggaaatgccgatcagcgcatctcctgccctcgcctgcgccagcaactgacggacgaagacgtgctcgaagccgagatcgttgccgaccgccgagatcatcgcgagatccgccaccagattagtggccgcaagcgctggacgtccggccgtgatcggatgcacgaattccaccgcgacgtgagaggcatcgcaactcgagccgccattgcccatcgaaaacatgcgtcccccaccgcgataaacgttggccagcgccttggcggccgcaacgaggatgggcgcatgctctccgaagaagcgcgcattggtgttgcgggaatcgcgggccttctcctcgaccgaatgcaacagcatctcgtcgagccgcgccggcgcttggggctggccgtgcaggaaaggatagagcgcctggaggtcagcatcgtttgacatggtcaaagcctcctattcggccgccgacaaccgcatcgcttcgatctcggcctgcgcctcgccaagttcggtcaggatctgcaaagtcagcgccgcttcctgctcgttgatccggctcatcgcgaagccgacgtggacgagcacccagtcgcctacgcaggcgtccaccggatgctcgtcactgacgatgcatgcaatattaacctgccgcttgacgccaccgacatcgacggttgcgagcttccttgtggcgtcgtcgatttttacgatccgtccgggaatgccgagacacatggcgcgtttccttccgggtggttttttataaggttgttgcttgaactgatgagatgggcagcgccgattgcggcctgcccgagcgccaggccaccgtcattggcgggcacctgcgcatgcgatagtacggtgaagtcgtggctttcgaggcgacggctgacctcctcgaacaggatgcggttctggaaacagccgccggacagcgcgaccgtcgcgaaacgccggggaccagtttcatcctctccgctggcgagccttcgcgtcatcgcgacgatggatctcgccaagcccttgtggaaccgcgctgccatcacgggcgccggcgtcttcaggatgagatcgccgaggaccgcgttccacatcgccagcggctcgatatagggcaagccggagccacgcaggttggggatgctcatgggatagccgagggtatcgtcctcgttgcgcagcgtgtcttcgtcgactatggcttccaggcgcgcggcggcttcgccttcatagccctgccgctcgcggcagatattcagcgcggcagcaactgcgtcgaacagccgcccgcaggacgaagcaagcggcgcattgatgccgtttttgatcatcgtgtcgagcgttgcccgcggcttgctcgcgagataggcgtgtacgtcgaggtcttcgaagttcatcgtgaaggcgggccacgccatctcggccatgagatgggcatagagatttcgccagggttcacgggccgcctgcgcaccgcccggcatcgcgaccggcttgaaggttccgagacgttgataattgcggtagtcggcgagcaggaattcgccgccccatagcgtgtcgtcgccaccccatcccaacccatcgagcacgatgccgagcaccgccggcccgtcgagcggatgaccgttctcggcgaggcaagccgcgacgtgggcgtggtgatgctgcacttccagcaaaggcagcccatcggtagctgcacgctcgcgcgcgagtttcgaggacagatattccggatgcagatcgccggccaaggctgtggccgcatggtcgaacagcttttgatacagtgcgagattgttccgataatcgtcgaaggtcctgacatactcgagatcgccctgatgctgcgacaggatcgccgccccgtccttcaccagacagaacgtcgacttcagctcaccacccgtcgccaccaattcaggcgcggcttcgaagcccctcggcagagtgatcggctcgggcgcgtaccccctggcccggcgcagcacgcgcacccgcccggcaacgacgcacgccaccgaatcgtcgatccgattggcgatctcgcgattgtgggtcagtacgtaggtggcaacgccgcggagccgctcggccgcttcctggtcggagatcacctgcggctcgtccgacagattgccgctggtcatcaccaccggtctgttcatccgccgtagcatcaggaggtgcattggcgtagtcggcagcatgaagccgagcgtcgcgaggcctggcgcgacgacttcgggcagcttctcgatgccatcggcgcgcagcagcacgattggcgccgacggcccggcaagcagcgcctgctccgctgcaccgacgctgcaataccgcctgatcacgtcgagatcccgcgccatcagcgcgaacggtttggcgtcgcggtgcttgagctgccgcagccgcgccaccacatcggccttggtggcgtcgcatgcgagctgatagccaccgatgcccttgatggcgacgatctcgccattcttcatcaagccgcaggcagcgtcgacatcgtccatcattgaaaactggtcgaagccgaacgcgctgccgtcgaaccggaccagcctcgccttcgggccgcaaacgtgacaggcaatggcttcagcgtggaagcgccgatcggccgggctatcatattcggcgcggcaggccggacacaggtcgaatggcgccatgctggtgttggcgcggtcgtagggaacgccgccgacaatgctgagccgcggcccgcaatgggtgcaattggtgaacggatagcggtagcgccgctcgaacggactggcgacttcctcggcgcaggccgcgcagatcgccgcgtccggcgcaacctgggtatggacacggcctccaaggctgccggcaatggtgaacgcggccgcgagttcgccgaaatagggttgcgtgtcaatcgcgtcgatgcgggcgagcggcggcggatcgcgccggatccgcgcgatcaacgcctcaaccgccgacgcgctgccgaagacgcggatcagcacgccgctggaatcgttgagcacctcaccggaaaggtccaggtcgcgcgcgtagcgccagacggtcggccggaagccaacgccctgcacgcggccccgcaccctgatctcgacggcgagacggccgtctgctgcggcgatgttggcacggcggctcacggcgcagcctcccaaagtagaatgcgattattgccggcgtcggccacgaccagcagattgccgcaggccgcagcaccatacggccagcacacgctgtcgcggccggcggcgcgccagcgattgtcgcccttttccgaaaacagccgttgcccggccagcgcgatagctggcgagtccatcccgagaccatcgagctcgaagcccaacaggcgggaatttgcggtatccgccaccacaagcatgccgtcatggacggtcagaccgtacggcatgttcagtgcgcttgagttcggatggtagaaggcgcggttgtgatcgagccccatgaagtcggcttgcccgatcacgaaatcgcatgcgctgccgttcgcgccgggaaaatgtctccatgccatcacccggttgttgccggcgtcggaaatgaacagcatgccacccgcgaccgcgatgccgtgcggccagcgcatgccgagcgcaccgccggcttcgccggcgttgtcgtcgcgtgtgatgaaatcgcgctgaccgaggaccagatcggccgcagcaccgttcaccgacggaatcgcgttccagaccaacacgcggcgattgccggtatcggcaacgatgagcttcccgtcggcaatcgcgacgccatagcaccagttcagggtcgcggcggtcggcacgccggcgccgcgattggcaacatgtccgctaaagtcggcatggcccagcacaacgtcggcaggttgattcgaggttgcgggatagccatgccagatcaggacgcgatggttccaggcatcggcgaccgccaatatgccgtcgcgggccgcaactccggtcggcatattgagcgtggcagcgccaacctcgcccttggcgttgcgtccctcgcgcgagaaatccggctggccgatcacaaggtcggcgccagcctgatcgccggatggcggcttgcgccagatcatcagccggtgatgccccgtatcgcagacgaacagcgggccgtgctcgttcgccaggcacgcgccgcgcggtccgaacagggtgtcggcgcccgggacgatcgatttcgccagcccattcgccaacgcctcgccgccgagcaccacgtgcgcgccgcgcagcgacagcaacggccgcgccacatggttgtcgccggcccggagcggggccttttgcaatctgttcggtgcgaacgagacctgcatggctatttcgaaatcctcacttcgattcgtgcgccgatcacgcgcacagcgtgcgattgcaactgcacctccggtgcggtcaggcactccccgctggcgagatcgtattgaaagccgtgatgcggacaggtgattatgccgttctcgatctctccgtcatggatcgggaaaccgagatgcgcacacgcgtcctggaagcaggtgacggtcgcaccattgcgcgacagcaggactctttcaccgccaagggtggttgagcggattccgccatcgggaatctccgacagcaagccggcggcgatccaatcgcccttggctccgagggcgaacggactgacgaagcgaacgccgttttcttccgggccgcccagtcccttcacctggatgatctcggtgatctccgggcagccttcctgaaccgctttcttgaccccggcgtgaaacgtcagcgcggaggccgggcatccgtcgcaggcaccgatgaagcgcacctcgacgacgggcggcctgaccttgacgagttcgacatcgccaccgtgcgacgcaagcatcgggcggacaccgtcaagcgccgcttcgacgcgctcgttcaggctcggcttgacgatctcatgccgccgcagcaccgcgtagacgatttcgtcggccagcgcattcttcatagcaacaagcgcagccgggtctgtcttcaggctccggatcagccgccgcagcgcctcgccgtgcaactgttcgatcgcaagcttgtaggcgccgaccgcggcctgctggttctcgtcccaagtcgcgaagatggtctcaagacgctcgacgtcgccaagaaacccggtgaggtcggtacgcatcgtcgaggccatgtcgtggacgttcatcctgaactcaccggttgtcttcgatgtcctcagaggtatctcagatccttgaacaggtagggctgcaagccgccgccgagcagcgccgccaccagcgcggccagccacagtggtgcgccggccttggcgaggccgacaaacaggatcgcggtgacgacgatgccgatcgccaattgcctggtgaccatgcgtggatcagcgaacaacttgccgcggaagaacaacacgatggagtttttcgtcatttcccacatcgaggaaactcctcagccgatgattgcgagaacgatgatgccgatcacgatgcccgcgaccccggcaagcggcccgtaaaaccctcccatcatcgctgcgagttcatttcccaggaccttgccgccgacgagcatgccgccggcggcgccgccggcaaccgacgcgagcgcgctcgcgatgagggctaagaccatcgccagaggcgtcagtgtaggcatcattgcttcgagactcctgttgatgagttcaaggattgctgcgcaccgcgaccgttcgtcgccggcaacatcagcaactcgcgctgggtctgatcgacggcctcggtgacgatgcgcgccttctcgaggtcgccgtgctcgacaaagacggcgcgcgcctcgcggtaataggcattcgccagggtgaggttggcgcggttgccgacatccggatttgccggatcgtccggcaaattccacaggcaattggctttgttggagatcgtgttggcgtattccagcggcgtggtctcgcgcgtgcggaccttcagcgcctcgtcataggcgtcgagcgcgcgaagattgttttccagcgtatggctcgacgagacgtattgcagcgcgttgccgaggttgttctgcaacatcgcatattcggtcggataatcgatcagattgacgaccttgaggccctcttcgaaggcctgcacggcaagcgcttcgcgcatctttccgcgctcgtccgtcatcggcatcgataggaaggcggtcgcgagattgctctgcagaatgacgaattcacgcgggtattggcttttggtgaagacacgcagtgcacgctgataggccgaaatcgcgtcggtgatccgcgcccggccggcgccggcaagattttgaatcaccaggccgagattcatttcggcctcggcgatctcttccggcttgccggactcgatcagcgacggcatcgcgttttcgaacgttgcgcgtgcctgctcgagcgccgtcgtaccttgttccgggatcgcctgcagtgcggtggccttgcgtgccagaatgcgcgcgcgcaataggtgcatgtcttgcgggcaaaccgtgagggctttgtcatacagcgcgattgcggactgcaactgatcgggtgacttcggctgctgctgcagccccatcgcgatctccatcagcatctccgcgcgttcggccggcgtcgcatccgcatcatctgcggccgagagcgcggcacggatttcgtctgcgatgaggctcgcggccaccggctcctccctgtcgtgcgtctcacgcacgttctgcttggaagtcactttagcgctggcttccgctcgatgtctacatgttatacgaattgaaaactaagtttgcagtccgaagacgccagccgataccagggccgcctgctccgtcgaccagaccacggaaaggtcgagcactgcgttgtcgtcgatgccgtgttcgcggaagaagtccggcgcgtgcacgacacgatcaccggccttgttgcgcagcttgaggagatagcccccggcagccgcatgcttgactggcagaatgcagagatcctgaccgcggcgcagcagaatgaccgcctcgagcccggcgaaatagcggtcgcagacgtcgcagcccagataaagcgcgccgcgcttcagggtgacggccgatccggcgttcatccggtttcaccctgcacaacaaggcgcgatctgatcagcacctcaacgcgatccgtcactctggcaaccgcggacgcaacccgttccgagagaccgatcccaagctcggttgtctgcacctcgatgagcagcaccaccacgtcggaagggaattgctcacgaaagatctgcctaccggcgtacagggcgtgatcccagcgaaaatcatgcagattgagtgacggctggtagggctgctccaactcgtcgcccggcacctcgaagaccgcccccgggtcggagcccgagcgacatgcgtcgacgatgatcaggctccggcagccgcgcgcagcgaacattgttgccatgccgtccgtcccggcggcgagcagacggacgcgctgctcatccgtgccgatgccgcgcgcccgcagccgatgcaacacctcgatgccggcaccgtcatccaggcgattggagtttccgcatccgattacagcgatcacgacagctaccctgggctcgacgtgttggtgatccggcgcatccggacgcagcccggtaaactgccttgagccacccggtcagatccgccagagtctgcacgaccacccgggctcgaccgggaggttgagctctggcaattcacagaagcgctgatggaccttgtagtacatgcaggtctcacagggctgctcgatgtcgccatgcgtgatcgcatgaagcgtaaagccgctgatcacgagcttggatttgaggtcgtcgccggccgatttcagtcggccaacgatcgactgcacctcctcgtgggtatcggcgcgcggaaaaacctcggtcttgagaccgctttcgagcaggaatttgatttcggcgcgcaagccctcgctgctcatagctcattcctcgcatcccgaccgatgtttcgaggcagctagattcgccacaagcgacaccaccattccggttcgaccggaacggcgagttcgggcagatcgcaccacctccgatgcaccaggtaatacatgcattcgaggcagcgttgcctgtccggcccgtacggatgatccaggaagccgccgacaaccagtttgctcttcagatccttcggatcgagctggcgcaactggttcaggatatcggcgaactccttttcggtctccggaaagggctcgacctgcgtttcgagccccttcccgagcatatcggcaatcgccttgagcaccgccccgttatcggaccccatcgatgctgcctttcaggatatccgttcgacactatcagggcagcgcgccccgatatcaatcatgacgtactccactttgcccgcctttgagtcatcaggcggttctgaaccgggccaactcctctccggtcttcgcgtcatgggcgtgaacggtgcataccagacaggaatcgtaggagcggcagacgtgccccacctcgaccggatcatggacatccttaatcggcgagccgatcaaggcctgctccatcgggccgcgaacgccgtcggccgatctcggtccgacattccacgtcgtcggcgcgatgatctgatagttcttgatcttgccgtccttgacctcgatccaatgacagagcgccccgcggatcgcctccgtagccccccaaccacggccgtcccgctcggtcggcttgatgtaccatgggtcgttcagcttgaactcgcgcagcgcgtgctcggcctggcgatacagcttgacgccctcgtgcatccgcgcgaagtggcggagcattacgctggcgccgcccagctttttgtacatgtcgagtaccaccggatcgtggtgctgccaggattcgccgtgtttgccgccggcgaccaactgccgcgccagagggccggcctcgagccggccgttttcttcgtgccgaactgcagtcgcccaagagtatttgcccgacatgtcgacggtgttcttctgcgtcgggacggtggtgcggtcaaacggatgcaggccgccgggctcgtcataccaggcgtgcatggtgtcctcgcgggtgtacttttgatccatcagcttgaactggtcggtcttaccgtcatagaccccgctcttcataatcagcgcagcgttgcggccgtcgatcgtcggcttctggtacttgtcctcgtgcggcagatatccccaggaaatgaaccggccatgaccgtggccgaacttgtccatgccgcaatcctcgctcatgcgccagaacatgcctagatcggaattggcatgctcgggcttctcgtcaagccaggccttgaaatcgtcataggacttgatttcttcgtagcgttcgagcgagcagccgagccagatcttctccatccagtcgcggcggaaatattccaggatcgaccatgcgcgggtaacgtcggtgagggtcggcgcgcacatcacgcccccgggcaccatgtagctggaatgcggccattggccgccgagcagcgcgtagatctcgaccggctttccggagatggtgacgccgatctcgtaattggtgccggtgaacggcgcccaccgcttgaccgcctcttggtagaatttcgacttcgcgtagttcttgttggtgtagtcgatcatgaagagcccatagtgatgacgcggcaggctctgcaggctctcgacgatctggccgagattacgtgccagaatcgcattgcggggcacctcggtttgccacgcggtatcgagcgcccatgcggcacaagtcaggtgcgacgcaccgcagatgccgcaagcgcgcggcgtcaccacgaggcctgcctgcggatccttgtcgcgcaggatcacctcgaagccccgaaacagttcggcctgagtccaggcgtcgacgacgacgccgtcctggatgtcgacacgaacgtcgagatcgccctcgacgcggccgacgggtgagatatcgagagtttgaacagctgatggcatttgagttcatcctgtttaatctggggtgtgaagatgttctcgcgatccgtccgacgaacacccgtcaaacgacgaagatgtcttcttcggcccaggctggagatgccgctttcgctgctgcggtaagtttgatgtagccggccttgtcgacgccggtcggcatgtccttcggtacgcccatcacggtctgcgtcttgaaaacggtacccggcatcaactcgaagaacgggaactcgggctcggtgcagcccatgcacggcatccccgcccgcgtcttcgacgactggcgattccagagaatgcggttgcagggcgaatgcgtcatcggaccgcggcagcccagatcatagaacagacagcccttccgctgaccgtactcggtcgccgaaaccttgtaggcgaagtgcatgttgcgcgtgcagccggtctgcgtgaagctggtgaagaaggtcttcggccgctggaattcgtcgagtgagagatcgccgccgcgcccggtcgcgaccgccacgacgatctgcgtgatccagtcggggtgcgccgggcatccgggtacgttgatgacgggcaagcccgccttcgacttgtagccggtgcccaggaagccgccgtgcttgcgcttgagaaactgcagtccctcgctttccgacgggtttggtgccgttgccggaatcccgccccaggtcgcgcagtcgccgattgccaccgtgtaggacgcgaccttagccaggtcggcgacccaatccttcatcggccggccggcgaagcgattccattcgcccgttccgttcggtgcattcacgaccgtgccctcgaacacaaagatatcgagcggcagctggcccgacgtgagcgagttcagcagcttcttcagattgtcgccgagctccatgccaagcgacggatgccagagcacgttgatgccgaaatcggtaacgagatcgcacgcactcggctcttcggcattgaggaacgacatcgtattgccggagcacgcgccgccttgaagccacagcagattggccatcattccctcccaagtctgttcaaaaggcgcgcgctggcgccgtctcgcgctagcgaaatttgcaagtcgcgtgccgcgtcgctatcgaatgggatgtccaagtcaaagcaatgacttgcgcggaatgatgcaatagcactgacgcattttcacgagcgccgacgctgcaaactatcttcgcaatgacaagatggttttcaaaaagccgaccgccgcgcgacgagccgatcgaacgcccatagcgttttcgaacgaagtggctgctggttcgtgcgaagaaaacccgtccatcctacgagccggagcttctgttctgattccatcagaatcgaaaatgctctagccgtgacggttgccacaaaccggacagctcacctcgagcagatatccgtaccagatcccgtggcagcggctgcaccaatggccggtggcctggcgctcgggcaggcccagcttcttggacaggctgctgagccccaactccctgaagggagcattgctccccggaggctgcgcgcgggattgcggaaagcggacgatttcagcctctgggtgatcgccgtcagaatcactgtcatccggcatgagacacctcaatgaggatggtcgagaccgtagcgcttgatcttgttcgccaagccgacgcgcgacaatccaagttcgtttgctgctcggctttgattccagcggtggcgcgtcaaggtttcctcaaggatgtgtttctcgagaccctcgaccttctccttcagcgttgtcccctgtgccaaataaccggctcgatctggccgcgggcgcggcggcgccgacagaatcgcgggggacatatttttagtcgtcagatattcgccgtcttcggccagcgccaccattcggcggatttcattttcgagttcgcggacgttgcccgggaagtcgaagccgacaaatttctccagcgctcccgccgatatccccagaatcttgcggccgatcgcattgctatgctttgcggcaaagaattccgccaacgcagggacgtcatcaggccggtcacgcagcggcggcacttcgagttcgaaccctttgagacggaaatagagatcctggcgaaattttccggccgccaccagcgcacgaagcgggcggttcgacgccgcgataatccggacattgctcgattcgatcttgtcggagccgagcggcttgatctcgccctcctggagaaaacgcagcaggctgacttggaaggacggcgacacttccgatatctcgtcgagaaaaaccgtcccgccgtcgccggcgcgaaacaggccgagtcgatcggaaatcgcaccggtgtaggcgccgcgcttgtgcccgaacaattccgattgcagcaactcgtccgacattcccccgcaattctggaccatcagcgggctcgcacggcgattcgagttgtagtgaatcgcgcgggcgagcaactccttgccggtgccggtctcaccctgaatcaggatcggcagttcggtacgcgctgccttgcgcgcgagttcgcatagctcggtcagcttctcgctgacatagacgagcttctcgaatcgctggctttccgcctgcaacggcatgccatggcgtgcatgaatctggatggaatcggcggaaaacttgaattcgcgtgacagcaggcgatgacgtctcgccagttcgcgggattccagaccccgctccaccacgagcccgatctgcttggcgtcgagcggcttgcgaacgaactgatagatcgccgccggcgagatcgcctgcttggtcagcacggtctttgcctcgagcgccaggacgcgaatgatatcgggatgggagatgcggagattggcaagaaactccagtccgtcgccgctggcgccgtgctcggccagcacgatatcgacatgcgcgtccgatagcgcgctcgccgcgtcctcggcggagcgggccgtcagcacccgatagtcatattcgtccgacagcacgtcggccgtggcggaccattgcggcccgcctcgcgcaacgatcaaaaccgttccgagcgcatccatgtattcttctttgtcaatttgaaaacttacttagcagccttgcgggaggcgttcaatcgctttgtccgcgccggccgatcgccgccaggcctgaagcgaaaggtccaggctttcagacagcaagaagcggaggcattgtcacatcatcggcagccggccggataggcatcatcttggcaccatccgcggcggcctatttcgctgcgcgttcccgcaaccggtagaactggatggcggtgcgggcggtctccggcttcagcttgttgaaggggacgaggaatttatcgacttccccgagcggggtacgtttggtagaggcctgcagcgtcaagacggccctggtcgcgctccacgacaattcaatggactttgccagcatcaatatctgatctgccccatcatggaccagcgcgcgctcaaccgcgccaaggggcacagcgcacatcaacgacagtgcgatggctgtctcgtcgaaccgcccggccgaagcaaactcgcgcaggcggtgctcattcaacccaccggactggttcagcagtcggacgtgggcgtcggccgacgcaaaatcggaagacaattcacgggtcttcgcttgaatctgatccgaggcctgcttgagcattccctgaatcaggcctgccttcttgcgatccgccgcctcgaactgacgccgaaccgcctcggacgcggcggcgaacaatgcgagcaggtgttcccgcgggatttcaggacgagaccagaccgcgagtgcgagttcatcgtcggtttttgagcgcgacaccagggtcgaataaccgaactcggagaatcttgcgccgaggttcgccgccgtgctgacgacgacgtcatggtcgccgcgctccaccagaacatcggtaacgtcctcgttcagcaatttgcgtcgcgaaatcgccagcaaatgcgcctgtcccttggtccttgctcccgtaaccagggtcttatcgtcgagactttccgagcgcgacagcaatggcccggccacctcaatcgaatcgtgcagcgctagcgtgcgactgaccagtgggggcgcgttcgcgatcgtggaaagtcgcagcccgaacgccgcgcacgcggtatgatcgatttcgtctatcaacctgcacatgacgtcgtcgaaaagcgccacttgctcaacgtcgaagcgtttggcaccggcaacgaacagatctgtcacccgctgcaggattccgacgcgagcgccgatgtcccggctcgcgaaggcagtttccagttggtcgagcagcgactggtggccggctgcatcggcgcgattgtgtaacggtgaccggttgatgccgtcgttcccgtgtcgccccctatgcggcatcttcaatgccctggcgctcgtgggtcacgtcgaagtcaatctcgcaaagcggccgggcgcggctgaacagatagccctgcaacgaagttgcaccggccaaccggagcaggcggtactgctcgtcggtttcgacgccctcggcggtagtgtgcattccgagcccctgcgcaagaaccagggtggactgaacgattgccgcgcagtcggcgcgggtggtcatgttctgggtaaaggacttgtcgatcttgatcttgtcgaacgggaacatcgtcaactggctgaaggacgaatagcccgtcccgaaatcgtcgagtgcgattgtgatgccgaggttcttgagctgggcgagcgtacgcaggcattcttccggcgactcgatgagcgacgtttcggtgatttcgagttccagccgttcgggcgagagcccggaatgcgcgagcgcgtatatcaccacgtcagcgagatcgctgttgctgaattgccgggtggacaggttgaccgcaaccttgacgtgggcgggcaagctcgccgcatcgacgcaggcggttcgcagtacccactccccaatcgacatgatcagaccggtctcctcggcgagtggaatgaatcgatcgggatagatcatgcccttgacgggatgccgccaccgcagcagtgcctcggcgccgcatatccgcgaactgacggtgtcgatgattggctggtaatggagctccagttcgccatgctcgatggcgtgccgcaaatcgcgctcgagttctcggcgcgccttggcgctctcgctcatttcctgatcgaagaagcaatacccgtcgcggccggcacctttggcctggtagagtgcgacgtccgccgccctcaggatggtcgcggcgtcactggcgtgatcgggcgccaaggcaatgccgatgctcgcggaaaccctcaggacgtgtccactgatctcgatcggttcggctatcatctggacgatgcggtcggcaagtgcactggcatcgtcgggaccgtcgatcccgcattgcatgatcgcgaactcgtcaccgccgagccgtgcaacggtatcgccctcgcggaccgagccacggagcttcgccgacacgaccctcagcaattcgtcgccgagcgcgtggcccagcgagtcgttgacgtccttgaagcggtccaaatcgatgcacaacagcgcgtggcgcaccccatatcgcacacgtgccagagcatgattgatctccaactgcagtaaggatcggttcgcaagaccggtcatggcgtcgtggtgcgccatatggctgatgcgcgcttcggattggcgccgtttggtgacgtcaaccatcgtaacaagggcgcccgcccgcccctcataggtcaccgcctgcgtatagacgttggcgtcgatcgtcactccgttcgctttacggtggcgccagctccggtcctcgaactcatatccgccgagatcgatgatttccttcagttcgtcccgatcttcggccggtcgaatgtcgaatatggtctttgccagaaactgttcgcggctgtgtccatacagcagcaccgcggcatcattcacggcgagaaatttgaggttttcgcgatcatagacccacatcggcaatggggcacgattgaatagcgtctggaacgcgtcatgcgccaggaagaaaccttcaatttgatcgttcggatcagacattgcggcaaaattggccgcgaaggctcaacttcaagttaagcggaggttgtcgcagcggcgcttggttaacggctgataagagtctgctgctgcttacgtcaatagggatatcaaaatcgcttgttcccgccaggaatggaaaactcctccaacgcggccaggcattgatgtcgggctctccgcccgctccccagtaggcagacacgtcccatagccgcagattcagcggatgtcgtccgtttgtgtgctttcgactccttggctctcgcaacatgtaacttggtcttgtcgacaaatcgtcgagagcacaatcgagccacccattatctaagtgaaggcctgcgccgacgagccgaccaaaacgtccgtttggccgctcaaatatccaattctacgacgcgaacgtattcgacctttgcatcggatccccgcactgtatcgaatggggtgaagatacagaaaacaagggagagccgaacagtaacctggccgaatccgccggcacaaaagcgccgcacgagacccactttttctcagcgtctctctctcgaaggtcttggaaaacaacaattttccaatggtgggcgcaccagggctcgaacctgggacccgctgattaagagtcagctgctctaccaactgagctatgcgcccggaacttgtccggaaatgaccctcgcaagagaggccgtcgtttagcaaagcgattccgcgatgtccagcaagctcgcgcaagttttcccgacttttaccaaccctgccgccagccgaaaggccgctggattccggcggcctttcatgggcttggcgaggatgccgggcagctggcattcagagcctgccggagcgctcctgatcggggccgtcatcgcggttgaaatggtggtcgcggccgccgcgctcccagcggtccatgtcgcgctcgagccgatggcgccgccagccctcggaaccgaagccgcgcccctccatgtgagtgagcatggtcagccgccgcttctggttgtcgtcgagcgtcttgtagagcgggtcggcggcatcggcgatcttcttcagcgaggtggcggtcgccgccatgttgtcggcacgctcgcgcaggcgagtgaccggatcatccggcctcgcggccttgtcggcatcggtcttctccgcggtcatccgcgcattggcgcgatcgagccgcatcttggcgaagtcgcgcaccgcggcttccaccggcggccacagcttctcctgatcggcggtcagcttcagcccggcatgcacggctgcgatgcgcgcgtcgagaaaggcggcccgatcctcttgactcatctgcgtatggccatggaaccaggggcgatgctgggcatagaccgcggtcgaaccggctaccgtgagcgctgcgatgccggcgagcagaacgttcctcatgcaaacctccttcaagggttgcttttaggatgataccgcccgcgacagccttcaacttacggattagacagagagacctctcttaccaagatgtaatccgcttcattgcccgccagaaacatccaaagcgcaaatgttgcgccttggttcagatcattcccaatagccgcggcagccacagcgagatctccggcacgtaggtgatcaggccgaggaaaaccagcatcgcgcacagccacggcagcaccgcgatcgtgatctcgctgatgcccatcttggcgatactgctcgcgatgtagaggttgaggccaacaggcggatggcacagcccgacctcggtgttgacgatcatcaggatgccgagatgcaccggatgcacaccgagcttggtcgccagcggaaacaggatcggcgccatgatcaacaggatcgacgacggatccatcacgttgccggcgagcagcaggatgacgttgacgaccagcaggaacatccacaccgagaagttcttgtcgatgatccaggccgccatctcctgcgggatctgctcatgcgtcatcaggaacgagaacagcaccgcgttggtgatgatgtagagcagcatcgagctcatgctcgccgcttgcagcagcaccttcggcacctctgagagcttcagctccttgtagacgaacacggtgatgaagaaggcgtaggtcgcggcgaccgcggcggcttcggtcggcgtgaagacgccgccataaatgccgccgagcacgatcgcgatcagcagcaggccccagatgctttcgcggaatgccgtgaactgctggccgatggtcgcccgcggcatcttcggataaccgttgcgctgggcgacgaagaaggtcaccgcggccagcatcagcgcgagcagcacgcccggcacgatgccggccatgaacagcgcaccgatcgaggtgttggtggagacgccgtagagcaccaggatgatcgagggcggcaccaggatgccgagcgcgcccgaggtcgagatcacgccgacgccgaaccgcttcggatagccgtgatcgaccatcgccggcatcatgatcgagccaatcgcaaccacggttgcgacgctcgagccggagatcgccgcgaacatcgcgcaggctgcgacgccggcaagcccgaggccgccgggcagatgcccgaccagcgaggtcgtgaatgcgatcatgcgccgcgcgacgccgccgcgggtcaggaaggtgccggccaggatgaagaacgggatcgccatgatgccgaaattgtcgagacccgaaaacagcttcaggccgacgctctcgatcggcacctcggtcatcgtgaacaggaaggtgagcacggtcaggccgagcgaaatcgagatcggcatgcccgtcagcatcagggcaaacagcagtccgaagataagtgcggcgctcatcacgcttctccaagcgcgacgggcgcggtcttgctggtctcgacgccgtcgacatgggaggcgtcatggtgcggcagctcgtcggtccaccagtaattccagcacacctgcaggaagcggaagcacatcaggtaagagccgagcgggatgcaggcgtagacgatccagctcgggatctccatgtcgggcgagacctggtcggtgtgcatcagctcgtagacgaatttggcgcccatggtgccgacgatcgcggtgaacagcgcgccgccgagcaggccgaaggtaatggtgcgcttgcgccaggtgtcattgaagcgattgatcagcacgtcgacgccgacatggatgccggtgcgcacgccataggcggcgccgaacttcgccatccagatgaacatgtagatgcagagttcctgcgaccaggcgagattgatgccgaacaagtacggatagagcacgggaacgtcgaccaggaatcggtgcacgaccgtgacgaaagtcagcagggtcgcggcgcccatcaggctcgcgatgatgatttcctcgagccggtccagaatcttcagcagcatagatctcccctgtcatggccgcccccgcggccagagcacttgatctccctccccccgttcttacagggagaaggttggggtgaggggctccatccgcgcgcaagttgatcattgcgctcgcggagcctccccctcacccgacattcaagctccgcttgaatttcgacctctccccgcaagcggggcgaggtgaagcacgccttagttcatcgggctgcggcccgtctctttcaggaattcgtcgatcagcggctggccgacgcgcgaggcgacgtccttgtagaccggcagcatcgccttgcgcatcgcttcgtcctgctccggcgtcaaggtcacgatctcggtcttgccggccttcttgatctcggcgagcgcgtcgtcgttttccttggccgactggttgttgccgtagtcggtggcttccttcatcgccttggagagctcgtcgcggacatcacccggcaggccgtcccagaacttcttgttcacgaccacgacatagccgatgtagccgtgattggtgacggtggcgtacttctgcacctcatgcattttctgggtgtagatgttcgaccaggtattctcctggccatcgaccacgccagtctgcagcgcctggtagacgtccgagaacgccatcacctgcggtatcgaaccgagcgcgcggaactgggcctccagcaccttcgacgactggatgcggaatttgagccccttgtagtcggaaggcgcgaccagcttcttgttcgcgctcatctgcttgaagccgttgtcccaataagcgaggccggtcatgcccttggagtcgagcttcttgagcagctgggcgccgagcggaccgtcggtcaccttgcgcagcgatttcaggtcggggaggatgtagggcagatcgaagacttcgaattccttgatgccaatcgggccgaacttcgagttcgacggcgccagcatctgcaccgcgccgagctgcaatgcctcgagttcttccttgtccttgtagagcgtcgagttcggatagacctcgaccttcaccttgccgccggtatacttctcggcgagctccttgaacttgtccgccgccttgcccttcggcgtatccgaggccaccacgtggctgaatttgaggacgatcggcgactgcgccgacgcctgcccgacaaagctcaaggccgcgatcgacgccgcagccaaaatgaatttacgcatgtttcctcccgcgtaattgcggggcacgagaccggccccgagacatccggtcgcaccattacagagaagcaacgacgattgccattgcccctttagcaggggccgattgcgccattgctgcactgcaaaattcgatacggcggtattcccgtcggctcttgcgaccgttcaacgacactgcccgcacgcagtgcccggccacgtccgcgtggtcaatgcgaggttgggcaatggcgggttcgccgggcgcgaatgttggtgcctgaagcggatcgatcgtcgacatcgaaccgcgcctttgcgatatcagctctgggccaccagcggccgtggcagccaccatcgcaactgccacgacgagacgctcgggcctaggtgcagacagtttgctgcgcccaggggatgccgaccggcatggccacgtctcgctggtcctcagcgcgacgccgtgctgatgttctcgccgaagaacttccaggtcttgccgtcgaacttcgcgagcttgaacgtgtcgaaggtggaatagtcggtcggcgacaccgagaccgtgatgccgggaagcaaaagcggcagcgagaccttgctgatgttggtggcctgcttcagcaggttttcgcgcgtcagctcgtcgccgcagttcttcaggatgatggccgtgaactgcgcggagagataaccgatctggttgctgccatcgatcggattgccctcgggataccactgcttcatgaaggcgagatagtcctgcacgcccttgtcggtatcccaggccggatcgcccaccaccttggtcgccagcgccgtcatcagtccggtggatgcttcgaggcccgcaggctcgagcacaccgccgatcgagctcgcaaccgacacgatgaagtgcgtcggcttccagccgagatcggcaaccttgcggatcgcctgcgcgccgaatttcggcgtcgtgatcgtcatcagcacgtcggcgcccgcggccttcagattgacgatttgggaatcgatcgtgggatcggtcacctcgtagctgagctccttgacgatgagaccggccttgtcgccgagcgcctccttgaaacccctgagatagtccttgccgaaatcgtcattctgatagatcacgccgatcttcgcgctcggcagctccttgaggatgtacttgccgtagatcttcgcttcctgcgcatagggtggatagaacggcgtggtccagggaaactccttcggatcgttccacttcgaggcccctgtggagatcaggagatgcgggatcttcttgctgttcagatatttttgaatcgatgaattggtcggcgtgcccagagagccgatgtcggcgaggatctcgtcctgctccaccagcttgcgggtctgctccaccgtcttcggcgggctgtagccgtcgtccatgctcagcagcgtgatcttgcggccgttgatgccgccctggctgttgatcatcttccagaaggcggcctccgccctaccctgcgtgccataggccgaagccggaccgctgtagggcatggtctgcccgatcttgatttcggtatcgctggcgccaggatcgtatttcttgtcggcggcaagtaccgccgacgtggacacaaggctgaacgcggcgattgccgcgagcgtgatgcaacgcatttgttctccccattcgcgtcgctgtttgccgcgacgtccggcgagataatgatcatgcccgcgcgcgatgtcgacccctgggggcggaaatctgcatcgaccgacgtcgaaggttacaaccccaaccagctcatcaccgctccgaacgatgcccagagcgtccatccgagcccgagcaggcaaagcagcgccgccgccatcgcgatcgtgagcagcaggccgtcctcctgcagataggcgatcgcaatcagcacgaccaccattcccggaatgacgttgaccagcggcagcggccagcctgccgagaaggccagcaggaacaccaccagaccgacgaggcggtcgatcacgtcgcgacgcgcgtcccagcgcggccggctgatgcgttcgatcgcctgcagcatcgggcggacaaagacggtgaaccgcttgaagcgcttgaaatcgaactgccgcttcgagacgaatcgcggaaacgccggcgcgctgcggccaagcatcatctcgaccgccggaaacagcagcgccagcgtcgcgatcgtcgcgacgccgggaatgatcaccaggagccccaaaagcaacaggagcaggccgaaggaccgcttgtccaggttgctgaggagccattcgaggtcgacggggccgtccggtgcttgagcgacgagttcctcaagaagctgggacgtgtgcgtgggggccaatggggctccggacgagggggacatgcctgcaaagtggtcagactcggcctcgattgcaactgctgccgaagcggattaggaagcataggtgaccaatgattccgatcaggcatggcaccaccatgcgccgacaagcccgattcctgccgctcgccgccgctggccgtggttcctgctggtcgtcgtcctcgcctgcgccggtgccgggggcgtctacgcttggccccagatcgcaccgctggttccgtcgctcggcaacacggcggccagcgacaagacggccgcaggcgacaaggagacgttgccggatctgctcgcgacccagcagaagctcgaggatgacatcggggcactcagcaagtcgatggccgaccagcaggaccagttgaagaccatcgtcgaccagctggcggccctgacgtcgaaggtcgacgcgctgcagcgcccgggttcggctccggtgccggcagcggcgatcaccgagcagccgcatgcaccggtcgcgcaggctgcggcgaagccgcgaaagccgccagttcgagcgcccaaaccatctggtccgatttcgaccgggggtgcgccgctcaacgtcgcacccggcggtcgctgagccggcgtctcgcatcagttcatgatcgatgcaggcctgtccgcggcggcggtctagtcgcggggccgctccatgcctgcccgcctgatggccgcgagcagcaggtcggtatccgaggaaagaaactcgatcaggcgcccggccgcttcaggggctgtcgagtcgccgacgattgcggcagtgaaggtttggacaagctgaagatcagcaggcagcagacccacgacctcgatgccggtctcctgcaccaactcgctggtcggcccgatcgagagatcagccctgcccgcgcgcagcgcttcggccgcctcggtgccgcgcgcctcgagggtgagcgtcaccgtgtccggcaggttcagcttcgggacgacctggtcgcgaacaaatcgtccgctggtgctgcttggcgccaccacccggccggcgtcgatcaaggcttgcctgagcgcggcagcattgccgatgtcgggcttgggcgagccggcgcgaactgcggcagccagcggcgccgtcgcgaggcccgattcggatcccgcacgaatccggccatcttcgtgcagcccgcgcaggccctcgcgcgacaggatcacgacgtccgctttggcgccgtgcgcaagctggtgcctgatggtcttcggaccaataccctccgacgctcctgatccggtttccaccttgatgccggtgctgcgctcgaattcaggcagcacctcgcggtagaccgcagcgaagccgcccgaaatgatgaccttgatcatgcgggcggccggtccggctatttctgcaggttcgcggcgaacagcttggctgcttcggccttggattcctgatcggccttggcgtcgtatcggagcggcaggttgaacttcttgccgagctcggtggcctcggggttggtgaacgcgtgcacggcgccgggatattcgatgatccggtaatcggccttcgccgcgtcgaaatccttcttcagcgcatcgtattgctcgcgcttcacgaacgggtcgtcggcaccgttcaggatcaggatcttcgccttgacggtgcccggcgccggcgcgggagtattgaggccgagagatgcgtggaagccggcaacggccgcaagatcagcgccggtgcgcgccatgttcagcacgaccgcgccgccgaagcagtagccgacggccccgatccgctgcggattgacggaaggctgcttggcgagttgctcgcgcgcggcgttgaagcgctgctccatcaccttcgggtccttcatcaccgagccggacagcgcgcctgcatccttaggattgtcggcggtcttggcgtcgccatacatgtccgcgatgaaggcgacatagccctgctccgcgaacttcttcgcctcgttgtggatatgcggggtgatgccccaccattcgtgcaccatgacgatgccgggccgcttggcctgcgtcgcgtcgtcatagaccacgaagcccttcatcgtggtctcgccgtcggtgtaggtgaccggctcttccttcaccgccgcttgcgcgctcgccatcattgcgatggcgcaaagggctcccaagatgttcgttcgcataccgatctccctttaccttgcatatcccggatggctactccgccgccgtccggatatcgatcttctcggcgcggaccgcgcagaacttgaattcgggaatcttgccgaacggatcgagcgccgggttggtcaagaggttcgccgccgcctccgcgtagcagaacggcatgaacaccatgttctcgggcacgtcgcggtcggcgcgcaccttgacctcgaccgcgccacggcgggtttccaggcgaatgaagtcgccgggcacgagccccttcttgcgcatgtccttcggcgtcatgaacgcgaccgcctcgggctcgatctggtcgagcacctgcgcgcgacgcgtcatcgagccggtgtgccaatgttcgagaacacgcccggtcgacagcaccatcggatactcgtcgtcgggcagctcgtccggcgggatcaccttggccggcacgatcttgccgcgaccgcttgcggtcgggaagccggtcgtgaagatgatctcgttgcccggcttgtcgggatcgtcgactggataggtcaccgcgccctcgcgaaccagccgctcccaggtgatgttcttcagcgacggcatcagctcggccatctcggtgaagacctcgcctggcccggcataattccagggcagtcccatccgcttgccgatctcctggatgatccagagatcctgccgcgcatcgcccggcggcttgatcacctcgcgcgccagctgcacgcggcggtcggtgttggtgaaggagccggacttttcggcgaacgccgaggccggcaggatgacgtcggcgtggaacgcggtctcggtgacgaacaggtcctgcacgacgaggtgatcgagcttggcgagcgcctgtcgcgcgtgctgcagatccggatcggacatcgctggattttcgccctcgacatacatgccgtggatttcaccggcgtggatcgcgttcatgatctcgacgacggtcagcccgcgcaccggatcgagctgctgcccccacagtctctcgaaggcaccgcgcatgtcgtcgcggccgaccggctgatagtccggcaggaacatcgggatcaggccggcgtcggaggcgccctgcacgttgttctggccgcgcagcggatgcagcccggtgccggggcggccgacctggccggtgatcagcgccagcgcgatcaggcagcgcgcattgtcggtgccgtggacgtgctggctgatgcccatgccccagaagatgatcgacgatttggcgccggcataggcgcgcgcgacctcgcgcagcgtctcggcgggaataccgcagatcggcgccatgcgctccggtgtgaactcctggattttcgccttgaggtcgtcatagccctcggtgtagccggcgatgtactgctcgtcggtgagaccttcagtgatgatggtgtggatcatcgcgttcagcatcgcgacgtcgctgccgggcttgaaggcgaggtgctgcgtggcatggcgcgacagcgtctgccgtcgcgggtccatcacgtacaacttggcgccgcgcttggcggcgttcttgatgaaggtcgcggcgaccggatggttcacggtcggattggcgccgatcacccagatcacctcggcatcagcggcggctgcaaacggcgccgacaccgcgccagagctcagtccttcgaacagcgccgccaccgacgaggcgtggcacagccgcgtgcagtggtcgacattgttggagccgaagccggtgcgcaccagcttctggaacagataggcctcttcattggagcccttggccgaaccgaacccggcgagtgccttggcacccttctcgtcgcggatttttagcaaacccgcggcggcaagatcgagcgcttcttcccacgatgcttcgcggaaatgggtgtagggattggccggatcgacctggtcgttggcgtccttcttgacgccgggcagccgtaccagcggcttggtcaggcgattggggtgatggatgtagtcgaagccgaagcggcccttgacgcagagccggttgtgattggcaggcccatcgcggccttccgcgtagatcaccttctcgtccttgacctcgtaggtgacctggcatccgacgccgcaatacgggcacaacgagtccaccttgcggtcgggccaggtgacgcgggtctgcttgtcgtcgagcatcacggccggcatcagcgcgccggtcggacaggcctgcacgcactcgccgcaggcgacgcaggtcgattcgcccatcggatcgtcgaagtcgaacacgatcttcgaatcgtgattgcgataagccatgccgatcacgtcgttgacctgcacctcacggcacgcccgcacgcacagcccgcactggatgcaggcatcgagattgacgcgcatcgccgggtggctggtgtcggcctgccaacgctcggccgccgggaatcggctttcggtgacgccggtcttctcggcccagtgccagaatttcgagtccggatcgtgcgaagtctcgcgcgccggctgatcggcgacgagcaactccatcaccatcttctgcgccgcgaccgcgcgttggctcgccgacttcaccttcatgccgaccgcaggcgtgcgcttgcaagacgctgccagcacgcgctcgccctcgatctcgaccatgcaggcgcggcaattgccgtccggccgataatcaggcgcgggcgaatagcagagatgcgggatctcggtgccctgacgcttggcgacctgccagatggtttcgccggcccgcgcttcgacttgctgcccgtcgagctcgaacttgatcgtctggccggagttctgatggttgctcattcgaatcctcgtcgaaattcgccctgcccggcccgcctattcggcggcttgctgcggacgaaagccgtccggaaaatacttgatcactgatgtcagcggattggaggcggcctgaccgaggccgcaaatcgacgcatcgcgcatcgcctggctcaactggtcgagcagttccttgtcccagaccggtcgctgcatcagcagcgccgccttctcggtcccggcgcggcagggcgtgcattgcccgcagctctcatcctcgaagaacttcatcaggttcagcgcggcctccctgacgtcatcagcctgcgagagcacgacgacggcggccgaaccgatgaagcagccgtatttctccagcgtgccgaaatcgagcgggatgtcatccatcgaggccggcaggatgccgccggatgcaccgcccggcagataggcctgcaaggtgtggccgtcggccatgccgccgcagaactcgtcgatcagttcgcgcaaggtgatgccggcgggcgcgagcttgacgccgggatccttgacgcgtccagacaccgagaagctgcgcaggccgtggcgttcgttgcggccgtggctcttccaccagtcggcgcccttctcgacgatgtcgcgcacccaccacaacgtctcgatgttgttgatcagcgtcggcaggccgaacagcccgacctggaacggatatggcggcttgtgccgcggcaggccgcgcttgccctcgatcgattccagcagcgaggattcctcgccgcagatataggcgccggcgccgcgccgcagatgcagggtcggaccaccgggcggaagctttgcgatctcgcgctcgaggatctcgcggcaggccgggtattcgtcgcggatatagatgtagacgtccggcgcctccaccacgtgcgcgccgatcagcatgccctcgaggaagcgatgcggatcggtctcgagataatagcggtccttgaaggtgccgggctcgccctcgtcgccgttgacggccatcagccgcggcccgggttcgccgagcacggcgcgccatttgcggccggtcgggaaaccggcgccgccgagaccgcgcagcgaggcatcgtcgagcgccttcagcaggtcttcgcgcggcagcacgcctgagcgcagccgcgccagcagttggtatccgccgcccgtaacataggcgtcgtagtcgacgtagggcggcagatgcacatgggtatcgccgctcttcgccgccgcgagcacattggtgacggtcgcatgatcgacgaagttgtggccgacctctgcagcaggcgcggtgtcgcagcggccgacgcacggtgcacgcaccacgcggatgccggggccggcgcgggactgaagatccttcaacagctgctcgccgccgagcatcgcgcaggtcagcgaatcgcagacgcgcacagtgagcggcgcgatgtcaggctcgccctccttcacgatgtcgaaatgcgcgtagaaggtcgcggtctcgaacacttcggcgaatgacagcttcatctcgtcggcgagcgcggccagatgcgccgccgagatctgatggtacttgtcctggatcagatgcaggtactcgatcaggaggtcgcgccggcgcggccggtcagagagcagcgcctcgatctcatgcgcggcggcagggtcgacctggcgtcccttgggcgtggctttcgcccgctttcggccggctccgggatgctcgaacgcgcgaaccttgtgaacgtcgtctccgctcatgaaacccgccttggaacctctggctcttgcacaaaccgcgcttgttgcaccaactctattctctggcatgccacaggcaagcatatttagaacgcctccagcggcgtcgggttgccgcgcaggtcgttgttaatgtttgcctatcgagcgatctgattttccaatcgcgcgatcgcccgacccgcgcgatctcgaccgcgtcacagcagatcggcgtagccgaggaagccgacggtatcgcccggctcgacccgcacgacggtctcgccgagttcgaccagtccatccgtctcgaccagcgacgacagcaggccggccccttcgcgaggaaacttggtcgcctccagcgcaccatccgccgcccgccgcagcgaaacgcggacatattcgcgcctgccgctcttcttcttgtagctgaaggcggcgcggatcggcagcggcagcagcggagccggcaccgcgcccgagagcgccagcacggtcggccgcactacatggacaaaggtgacgaagctcgccacgggattgccgggcaagccgatcagcggcgtgccgtcgatgatgcccatcgccaccggacggcccggcttgatcgccatccgccacagcaccagcgagccggcctgctcgatgccggccttgacgtggtcctcttcgccggtcgagacgccgccggtggtcaggatcaggtcaaagctgcgtgcgacctgcttgagcgccgcagcgagttcggcccgctcgtcgcgcaggatgccgagatcgccgacctcgcagccgagccgccgtaacatcgccatcagcatgaagcggttggaatcatagagctgcgcttcggcacgcgcactccccggcgcggccagctcgtctccggtggagaacaccccgacccgcagccttcgcaccacatcgagcgtgctcaacccgaacgccgcggcgacggcgatgtcctgcgggcgcaggcgccggcccgatgccaacgcgacagcaccgcgcgcaatgtcctcgccggccggccgcacattggcgccgggcttcaggccgggcggcaggatcacattgccggcgtcgtcgatccgcacgtcctcctgcatgaacacggtatcggtgccgccgggcatcggcgcgccagtgaagatccgcaccgcctggccgggccgtgcgggctgtgccggcgcacccgcctgcacgcgtccggcgaccggaaatgcgcgctcgccatccgtcggcaggtccgcacccgataccgcataaccgtcgacggcggagttcatgaatggcggcagcggcagaggcgcggcaatgtcgccggccaggatacgtccgtcggcatccaccagcgcaacggcctcggtctcgccgaccggcttgacgcgcgcggcgatgatcgcgacggcctcgtcgaccgacatcatcggcccgccgaatgcgaagcagtcgtcggaaagctgcgccatcgtctctctcaatcctcggccatcgacaggatgtgttcaagccggatcgccaattgcggcgtgatctctaaagccggaccatcagtggcagttccggcggagcggcggaaagtggccagtccatctccgatcgtgcttatatccccagctccattgccgtgtgaacccatcgggactgcgacctgtgaccacgaaaaccaccgctcccatcattgttccagacccggacgatccgcggctgacggagcgcgtggtcggcgtcgaccagaccggcgcgcggaccgagatcaaggtgccggtcgagcggccgctcacgctatacctcaacgcgcaggagatcgtcacgatgatgacgatcaacgactatcccgaatacctcgcgctcggatatctgctgaaccagaacatgctcaaatatgacgacgtcgtcaccgaggtcgaatatgacgacgatctcgaggtcgtcgtggtgcgcaccgcgcaccacaccaatttcgaggcgaagctgaagaagcgcacgcagacctcgggctgcgcccagggaacggcgttcggcgacctgctcgaagccgtcgagaaggtcgcgctgccgaaggccgaactgcgaacgtcctggctctaccggatgacgcacaccatcaacacgatgccgtcgctgtatctggaagcgggcgccatccacggctgcgtgctgtgcaaggagagcacgccggtgtgctacaccgaggacgtcggccggcacaacgccgtcgacaagatcgcgggctggatctaccgccacaatgtcgatccggccgacaagatcctctacaccaccgggcggctgacctcggagatggtgatcaagacggtccggatgggcatcccgatcctggtctcgcgctccgggttcacggcatggggcgtcgatctggcgcggcaggtcggattgacgctggtcgggcgcgcgcgcggcaagcgcttcatcgcgctgtccggccaggagcggatcgtctacgaccagaacctcgactatgtcgaagaggaatcgatgcgtcacaagcgcaagggcgagaccgacaatgactgacattcccggcgtgctgctggccggcggcctcgcgcggcggatgggcggcggcgacaagccgatgcgccagatcgcgggccgcaccatcctgcaacgggtgatcgaccgactcgcgccgcaatgcagcgggctgatcatcaacgccaatggcgatcccgcgcggttcgccgcgttcggctttccggtcgtagccgacgatgtcgtcgattttcccggtcccctcgccggcatcctcgccgcactcgactggaccgcggccaaccggccggatgcgaaatgggtgctgagcgcggcgggcgactgtccgtttcttccgcgcgatctcgtcgcacgcctggagcaggcgcgcgccgccgagaatgccgagctcgcagtcgcctcatccggcggccagacccatccggtgatcggcctctggagcgtgcgcctgcggaacgaattgcgccatgcgctggtcgaggaggatgtgcgcaagatcgatcgctggaccgcgcgctatccgctggcaacggtcgaatggccgaccgagccgctggatccgttcttcaacgccaacaccgttgaagacatcgcggaagccgatcgtctcgccgcgctggacggcggataggcggctgcgtgcctagccggtgaagctcacaccgctgaggttgccgccggcgtcatatgtaaaggtccatccccatgccgtggtggatccacctcttgcgtcaatcacgttctcgctgacatgattctggtcccacttcatgccgcccgcgacgtcatccagctgatcgaggctcagttcggttgcgttgagattcgccatcgccgttgctcctgtttgagactgcggcggaggcttacgtcgattggatttgagctaccgtgacgtgggtcacatcatcgcgggtggacgactggagaagccgctgcgttcgtcaatccgccctgcaatccctccaaacaaaacgcggcgccgaagcgccgcgtctcaacttgccgatcgtgcctgtccgtcagctcgcggcggccgccggctcgtcgcgctggcgcttcatcacgatcttgttcagcgcgccgagataggccttggcggacgcgaccagcgtgtccggatcggccgcgcgcgcggtcatcgagcggccttcatgcgccaggcgcaccgagacctcggcctgcgcgtcggtgccttcggtcaccgcgtggacctgatacagctccagcttggcctcgtgcggcaccaggcgcttgatgcagttgaagacggcatcgaccgggccgttgccctcggcctcttcgatcttgatctggccgtcgacgtcgagcttcatggtcgcgcgctgcgggccatgggtgccggcgatcacggtcagcgaggtcagcttgatgcggtcgtgggcggccgccatctcctggtcgaccagcgcctcgatgtcctcgtcgtagatgtccttcttgcggtcggccagcgccttcatccgcgtaaaggcatcctccagctggttggcgccaagcttgtagcccatctcctccagcttgtggatgaaggcatggcggccggaatgcttgcccagcaccagcgaggactgcttcaggccgaccatctcgggccgcatgatctcgtaggtcgaggcgtccttcagcacgccgtcctgatggatgccgctctcatgggcgaaggcgttacggccgacgatcgccttgttgtactgcaccgggaacgaggtcgcggccgataccaccttggaggcgcgggtcagctgcgtggtgtcgatcttgttccagtacggaaacttgtcgttgcgcacgttgatcgccatcacgatctcttccagcgcggcgttgccggcgcgctcgccgatgccgttgacggtgcactcgacctgccgcgcgccgccgacgatgccggccagcgagttggcgaccgccatgccgaggtcgttgtggcaatgcaccgagaagatcgccttgtcggagttcggcacccgctcgatcagcgtccgcatgaagtgggtgtattcctccggcaccgtgtagccgacggtgtcggggatgttcaccgtggtggcgccggccttgatcacggcttcgacgatccggcacagatagtccatctcgctgcgggtgccgtcctcggccgaccattcgacgtcgtcgatctggttgcgggcgcgggcgaccatcgcgaccgaggtctcgatgacctgctcgggggtcttgttcaacttcacgcgcatatgcagcggcgaggtcgcgatcacggtgtggacgcggccgcggcgggcgaacttgacggcttcggcgcagcggtcgatgtcggccggatgggcgcgggacaggcccgcgatcaccgagttcttggagcggcgggcgatctcgctgaccgcctggaagtcgccttccgaggtgatcgggaagccggcctcgatgacgtcgacgcccatgtcgtccagcagttcggcgacctcgagcttctcctcgaaggtcatggtggcgccggggcactgctcgccgtcgcgcaaggtggtgtcgaaaatgatgacgcggtccttttcggacttatcagcggtggccatgtcagaaattcctttgagcttttgcgcccgtcattgctgcttgagcgattggttgggcgattatcagggtccggtgatctcgtacaaacccctgagtgcccaggcacagatgcccagccggccctcaggggcaggtaagaagcaggccgccaataagcagggtgggccgcgcggccgggatcgtggcggtagcctgggccacctcccccgaaatcccatcgatttggccgcgaatcagcattgccagaccctgttgagcgccaaaaccctcggtcaaaaccattgacggttggttgccgggacgcgctttgcgccgtcgttctagacgattatggcaagccgccgcaatgggtaaagatggtcagggggattgacctaacgtggcgagacagcttggcgcatcagggacgcgaaagcggggggctctcctcccctcgggcgaccgccgcagccacgcttggccaaatctcgcaaaacaaccccatgcaaaggggagcgggcggccgccggcgttggacaaggcacttgacgcgtcgggcaactcacggctacatttctaatattccgaaatcattcaagcgcctcgcatcggaccccagcaaggcgagccgagcccaaccggtgggctcacctcacatcggccagcgatatagcgcgggttgcgccgcagccgcgccgcattgcagacctcgaagcatggtcggacactggcgcgtcgcgcgatccggcaaaggggccggcggtgatgaggtccgattccggccagcacgtcccgccgcgccgacctggatcgaaccgatcaatcagccccggagatatcgcgctcgatcacaccgatcacatgatcggcgcggaggcgatcgcccgcttcatctcgaccgagatgcaccgcccgttctccgagatcgacatcgcgttccgcgcggttcatgccgacggcgacagcgtcatcgtcgaggaacgcatgcgcgccacgctgcccggcggccggacttacgacaacgactactgcttcgtggtcgaggtcgaggtcggccgcatcaagcaggtgcgcgaatacatggacacgcgcaagggctggcagatggtgttcggagaagctgcggcgtgaagcgtgctgggcgcgctccggcgcagttgcatgcacacgtaagggacgcaccagcgggcgggttccctccccccttgcggggtaggggaatcgcatatggcgatggaggggtgttgccaagcggttgg

SEQ ID NO: 28 - DNA, 110635 bp, Bradyrhizobium enterica
ccggcctgcgccgtgcggtgttggaacgtcttggccggggctggtcgcccgagcaggtcgccggccggctggctcgcgagcacggccgcaaggtgatctcctatgagagcatctaccgcttcatttatgcccagctcacccgcacctcggacttcagctggcggcgctacctgccgcgcggcaagagcaagcgcggtcgccgcggcaagcggggcggcagtcccgcaagcttcatcgaaggccgtgtttcgctggatctgcgccccgtcgaggtcgccgatcgcaagaccccgggccattgggaggccgacctcatgatgttctccaaatacggtcagcagatcctggccgtgcatgagcgcacctcccgcctgttgctcggcgtccccctcgcaagcaagctcgcctccggcgtcgctcaccatctcgtacgcctgttcgaggtcctgccacagccgatccgccagaccgtcaccttcgacaacggcaccgagttcgcatctcaccttgccttgcaaagcctcttgatcaagacgtacttctgcgatccccacgccccctggcaaaaagggggcatcgagaacgccatcggccgcatgcgccgcttcatcccgcgcaacaccgacctcgaaaagctgccaacccgccgcctgcgcaagtccatcgccgcctacaacaacaccccgcgcaaatgccttgacttcaggaccccggcagaggtctttgctgctcaagtgttgcacttcgagtgtgaatccacctcccggctttcgccgggacgacggctttcccgagatgcttgttgttgtgcgtgccgcgttcttctcacgcttccgcgatggcatcgctccacggatggaacggctcggtggcgccgctgttcgtcgtgccgtcgcgcagcacgatgctggggcaggcgaacttcttcggctgggtctggatccgcgcctcctcatagtcgaagcggccgcgcagcgcctcgcgcacggcttgcggcaggcggacatcgccgatcacgatggcgccttcgctggcgtcgatgcgtggcgcgtggatcgcggtgtcgagattcattccgaagtccattacgaaggagacgagctgcgacaccgcgggcaggatgcggcggccgccggacgcgccggcggcgaagcggcggccgtcggccgcttccgccaccacgggcgtgtagttggtcaggcagcgcttgcccggcgcgagcgagttcggattgccctgcaccggatcgaaccacatgatgccgttgttcatggtcagcccggtgttcggcgtcacgaatttggagccgaaggtcgagagcagcgtctgcgtcactgcggccatgttgccgtcgcggtcgactgcggagaaatgcgtggtgcaggatggcgccaccgcctcggcaccgagcgcgcggcggccatcgacgtcgcccatgtccttcaaccgctcgcgataggcggcttgcagcgcttcggcataggctgcataggccacagcatccgggccgccttgcgccggtgctaacgccttctgcaacagaccgagcgtgcgtgccatcgtggggcccgcggtcagttccggcgtcgcgtagaccgtgccgccgcgatagggaatcctgagcggctcgcgcagatgggcgcggaaggcggcgagatcgcgcaccgacagcgcgccgccggcggcctggatatcgtcggcgatgctgcgcgccagatcgccctcatagaaatcgcgcgggcccgccgcggcgagctgcgccatcgtcgccttcagcgcgtcctgcggcatccggaccaccgagcggatgccccactgcgcattcggcggcaggccatccagcagataagccgccgcgctggcgggatagcgccgcagatcggcggcggagcttgcgatcatgtcggtggtccaccaatcgaccaacaggccttcgccggcgagcttgacgctcggcgccagcaggtccttccacggcatcctggcgtggcggcgatgtgcctcctccatgccggcgacgacgccgggcacggcgatcgagccggggccatgcaggttgcgatcgtccttcacgcgagcccaggggaacaggtcggaggccgcaccgccggtcagcggataatcctccaggcgcaggccgtcgggtgcgcgcatgccgtagtcgatcacctcgacgcggttctccttggcgcgatacagcaccatcgcgccgccgccgccggcgccgctcatccacggctccagcacgccaagggtaaaggtggttgcaatcacggcgtcgacgcaatcgccgcccgccgccaggacctcggcgccgacttcggccgcccggcgcgactgcgccgcgacgatgccgcccttggtgctgacggccggcttacggatcacttgcgagttggagaactgatcggacatggcgttgctttcgctgttcttgttgcgggcggggcacgttggcgtagcatgtcaggcatggcactgtcagtgcaacaacaagaaccagtttcagggagcggaaaatgagcagcgtgaagcgcgaacgggacggcaaggtcggcatcctcacgctgaatgatccagccagcctgaacgcgatgacaccggaactgctcggcgatctcgcgcgtgcgatcggcgagatgggggtcgagcggggtattcgcgccctgatcctgaccggggaggggcgcggcttctgctccgggcagaatctcaaggcgttcaactcgctcggcgacaacatctataccggcgtgatgaagcattattggccggcgatgcaggccttgcgcgaatgccagatgccggtggtggtcgcggtcaacggcgtcgcggccggcggcggcttcagccttgcgatgtccggcgacatcatcctggccgcgcgctcggcgagcttcatccaagtgtttagccgaatcggcctggtgcccgatctcggctcgacctggctcttgccgcgcctgatcgggcggcagcgcgcgctcgacctgatgctgctgaacgagccgctgtcggcggagcgggccaaggagtggggattggtgcgcgaggtcgtcgatgacgcaaagttgctcgacgaggcaaaagtgctcgccggccgcctcgccgatggcccgacgcgggcgctggtcgcgacacggcagctcctcgaggagagcgagcacgcgagctacgccgagcagttccgccgcgagatcgagctgcagtcaatcatccgcgaaagcgccgacgcgcaggaaggccgcaaggccttcgtcgagaagcgcaaggcccagttcacgggacgctaggccttggcgctccaggtgctacccgatagcgatcgcgatcttgccgaaatgggcaccgctcgccatgtgggcgaacgcgtccttgacctcgtcgaatgcgaacaccttgtcgataacaggcttgacgccgtgcatgctgatgccgtcgcagagcgcctgcagatcctcgatcgagccgacagtgacgccctgcaggcgctgctgctgcatcaccatcagcggcagccgcgagtcggacgaggcgggacctgcgagcacgccgatgaaggcgatggtgccgccgatcctggtggcgcggatcgactcgttcagcgtgccgacgccgccgacctcgaccaccagatcgacgccgcgcccggtcagctcgcgcaccttcttgccccagtcgggcgtggtcttgtagttcagcgtgacatcggcaccgagctgtttcagccgcgcgatcttggcgtcgctggaagaggtggcgatgacgcgggcgccgcacattttggcgaattgcaacgcgaacagcgagacgccgccggtgccctgggtcagcaccgtctgtcccggcttgatgtcgccgagcttgaccaccgcgctccacgccgtgaggccggcgcatggcaatgccgcagcctcgatgtcgctgagatagcccggcgtgcgcaccagcgcctgcgccgggaagacccggtattcggtcagcacgccgtcgacgctgccgccgagcgccgcacgcatccgcgcctcgctcggctcgccgccgagccagctttcgaagaagctgccgatcacgcgatcgccggccgcgaaatgtttgacgccggcgccgaccgcctcgaccacaccggcgccgtcggaggccgggaccagcggaaatttctgccgcgagccgtagccgcccttgaccgtgagcaggtcgcgatagttcagcgtcgccgccttcagccgcaccagcacttcgccggtgcctgcctgcggaaccggcttgtcgaccagcgcaagcgcgtcgacgccgccggggccttgcaactcgtagcatttcacgggacgcctcctgctaggtgttctcgtcgatattctcgttttgggccgcgcacccggcaccgccgcgtatccagcgagcatatgtcaggcttgccgcgcatggccagtgcgcgaggtgcggccgatggaatggcgcctatgctggaacaatttggtgccggcggcacatgccgccaacccatgccgaacgatgaaatgatctggcggaggtgaccgtggctgccgtgcttgcgacgagacgcgatccaatcgtcaccttcgcgcgcagcgtggtccgcatgctgcttgccgctgcattgatttgctgtggtgtcgcgatcgcggcggcagacgacagcctctaccgcgcgcagaccgtcgtcaccggacagggcgagccgaaccgcatcatcggcttcggcgcctgtctggaggacgtcctgatcaaggtctccggccagccgatgctggcaagcgaccgccggctcgcgggctataaatccagggccaaggagttcgtcagcagtttcgactatcacgaccagtatgccggcaagccgcatcacgacgagcagggcacccgcgatcggccttacgacctcaccgtggccttcgaccagagtaagatcgacggcattctcgccggacttggcctcaagccgtggcgatcgcagcggccagtgctcggcgtcttcgtcgagatgctgcacggcccgaaggactatatcgtcacatcagacggcacgcagtcggatttgcagcgcgacgcgctcgcggcagcggccggcaagcgcgggatgcgtttcgtgctgccggatgcgtccgcgctgaccaatgccggcatcaccgcggccgagctcttgaagacgcagccggcgaagcttgccccgatcgtggcaccgcagggcggcggggccatcctggtcgggcaactggtctgggacgacaaggatctgggttgggccacgcaatggcggatggcctggcatggccgggactacaaatggcaattccgcggtgtcaccttcgacgaagcctttcgccgcggtatcggcggcgccgcgcaggtgctgtccggcaatggcgatccggggcgatcgaaatgagcctgcgggctctaaagcatgatccggaaaagtgcgaagcggttttccgaaaagatcatgctcaaacaaagagctaaagcgcgatgacgattcaaccaaatatcatcgcgctttagccggcgtagccaagcgtctgcgacgggtactccccgaacatcgcgcggtagtattgcgagaagcgtccgagctcgatgaagccctgttcgatcgcgaccttggacacggtggtctgctccggcgtgctttcgcgcaggatcgaacggatcatgcagagccgcttgtagcgcaggaacgtcaccgggccgacgccgaacacctcgtggaaggcgcggtgcaggctgcgccgcgacagccgaagctcggtgcagatttccgagacatggaccgggcgggtgcccgcggtgcgcagatagtcctcgacgtcgcgcaccagcctcatcgccgagggcagatatctggtgccgtccggcggcagcgacgtgacgaccgtcgcgctcacgcagtcgacgatcgcgcgtttccagaattcggccgacgcctccgacagcgcgtccggataccgtgcaagatgcgagacgatctgcggcagccggtccgcggcgctcatgccgatggcggggtcggcacggaagtggttcttcgcttgccaggtttcggcatcggcgagccgcggctcgccgccgaacagctcgggaagatcggtcatgtcgaagcgaatcgccgcataggacgaggcccggtggaacacgccgtcatgctcgaccgacggaggaatcaccagcacgtcggccggttgcatgtcgaatgcccaatgcgtgacgcggtccgtcgcattgagcagcatgccgatgatcagcttgtcgtcggcggaggtgcgctgggtgcggaccccgacattgaacgcgccgatactgagcgaaaagtcgccgatcccgacgtgggacaacgtgccgcgcagcttgccgcgctcgagctgcatgacttcgacatgcgaacctttgacggcgtcgtggagcccctcgaagccgtcaagctcgccggtgtgaatcgacaggtccttgcccatatccacgcccacaagtgtagcgcgaccaatctgccgataccaaatgacgtgaaatcagtacaaaatacaacccgacacaacccgccccgatgggttcgattcgcacgacgagacggcgcggattcttgccggttttgcccgggaaggcaacgcgggcgacggcacgggattggcggtttcgtttccagacggcacggcctgggcgggattggcacaaagtgcacatcaggcccgccgcctgggcggcaatcgtttgatctcaaagcgaaatgcgcagccgtcagctgcgcgttggcgatggctaggccgccatcagttgctcaagcgcaacagcctgctcgcgggtctggaatgcgatggcggtgtgggtaaagcccgacgaggcctgggtctgtgcgatgtgattgaggacttcgttgcccttgaccacgtgaaggtccatgccggggcctgccgggaaaatgccgagcacgacgtcgtaggcgtcgacgatggccttcaaggcaccacccttgtcttccgatgcgtcgatgaagatacgaacgtccgcggcgatactacgaagttcgtcaaagtcgatcactggaagtctcccatacgcaaacgcaacgcactgcttgatcctagctacaacttgcttactgaaacataaatcacgccgggttccgtagcaggccgttgcggtggcaagagctgctcaggtcttgcgcgccggcgccgtcaggatgattcctgcatcgatcaggccgctgcagatcgtcttcagcgcggcgattgcttcacgcgtggcgcggctgaccggccggccgcgcggcagcgccagcacgcgttcggcgcgcatccacggcaacagcgccgccgacagcgcgccggccgccacttcctggtgaattcccgagaacggcagcaaggcatagccgaggcccaacgccaccatgcgcttcatcggcgtgctgttgtcgacccgtaccgcggagtgcgtcgtcgacgggaacgggttgcggctcagcggagccacggcggacggcagggcgtcgaactccttgcggctcagcctgccgcgcttgaacagcggatcgcgcggcggtccgatcaggaacacctgctcgaacatcaacacctcatagtcgagatgatcattgggaggcggcgtcgtcacgatcgccaggtcgagctcaccgcgcagcaggcgttcggacagattctcggtcagcccctcgttcaactcgagccgcacacgcggaaactgcttcacgaatgtctgggccagcggcgcgtagaggacatcgccgaggctcggtggcgcgccgatccgcaccgtgccgctcggctcgcggttctccgtgcgcacctcggccttgatgtcgtcgattgtcccaagcagccagcgcccgcgcgcgagcagcaccttgccggactccgtgacggagacgccgcgcgcgccgcgttcgagcagggcgccgcccagttcgtcttcgagttccttgacgtggcggctgagcgccgactgggcgatgttgagcgtgctggctgcggcggcaaagccgccacgctcggcgacggagacgaaatagcggatctgccgcaggtccatgacaggcactccatctcatatcgagatggataccatatcaaacatattcttgtgagataccaaaaagagcgcagtctctccgcaacgatcaaacggaggagagacgaggatgggcatcgcgaccgatgaggcacgccggacatccgtattcatcgccggcggcgggccggtgggcctggcgatgtcgctgctgctcgaccgcttcggcatcgactgcgtggtggtcgaaaagagcacgacgacgacggatcatccgaagtcgcgcggctgctgggtccgcaccatggagatcttccggcagtggggcatcgagcaggcgatccgcgagcgcggattgcaagacaactccgacatgttcgtgttcctcgacagcatcgcgggtcacgagttcggccgcacccgtcccgaaccgaatgtcggtcatacgcctgcctggaaaagcctggtcgcccaggatgccgttgaggaagagatcctgcgcgtggtcgagaagtcaaagcacgcgacggtgctgttcagcacggaatgtgaatcgttcgaggagaccaacagcggcgtcaacgtcacgacgcgctgccagaagaccggcgaggtcacacgttggacggcgacctatctgatcgccgccgatggcgcgggcagccagacgcggcgcagcgccgggatcgacatggtcggaccatccacgctggccgtgatgtccaacgaatactggcgcgccgacctgtcgcggctgccgatcgcgcgcgaggccgccggcttcatcatcgtcccggacacgcccgatctgccgcgcgccgccatcctgaacaccaatggccgggatcgctggctgaccgtgacgcagatcggcctgaccaaggacgatcgtgagaggccgtggaccgaccaggagttcatcgagatcgcgcgcggccatgtcggcattcccgatctcgacgtcacgcttctgaatcgttcgatctggcgcgtcagcatgcaggtcgccgagaccttccgaaagggccgggtgcttctcgtcggcgactgcgcccaccgctttccgccgaccggcgggttcggcctgaactctggcgttcaggacgcgcataatctcgcctggaagctcgcattcgtgctgaagggcctcgcggacgaaaagctgctcgacagctattccagcgagcgccgtccgatcgcgcagtccaacgccaatttcagctacggcaatcggctgcgctttgggctgactgatgacgccgttcgctcgcgcaatccggaccggatcaaattctggatcaacgacatggacaatcacctgcacagcatcgggcagaacctcggacacaattacgaggagggggcggtgatccccgatggcaccgtcgcgaaggcgatgaactcccgctactacacgccgaccgaccgtcccggtgcgcgctttccgcatatgtggctcgagccgtcgcgcaagaagtcgacactcgactggttcgacaaggaattcaccgtcgtcaccggtccgctcggcagcgagtggctggaggcgggcaagcaggtatcggagaagaccggcatgccgctgtcgctgaagcagttgccgtcggccgacccggcggacggcttccagctcggcatgcgcggcgcggtgctggtgcgcccggatgggcacgtggcgtggcggatgccgtggctgccgtcggatccggcgaaagagctcgccggcgcgctctcgaccttgctgcattagggaggtctccgatgcagtcgctcgaagccaacggcatcgttacggcatatgagaagacgggacgcggcgaaccgatcgtgttgctgcatggcggcgaggccgatcactcgatgttcgacggccttgcgccggtgttggcgacgcggttcaccgtgatcgcctacgaccagcgcgattccggcgccaccaggaatcccccgtcgtcctattcattggccgatctggccgacgatgccgcggccttgatccgagggctcggctacgatcgtgcccatgttttcggaacctcgctgggtgggcagatcgcgcaagtgctggcggcgcgccatcccggcagcatcgaccgcctggtcctgagcagcacctggaaggtcaacaaaagcccgctggacgtcaacgcggatgccttccgtgcgctcgcgtcgtaccgcagtgacaccgcaggcaacgcaccaaaaatcgcggaattcttcttcccgccggactacctgcgcacgcggcccgagctgattgagatcttccgcggctccagccgcgacgacggccagaaagcgcgacgcggcgccttgctcgcgcagcccgtcgccgccgatctcgccggcttcgatcgcccgacgctgctgctggtcggtggcgacgaccggctgatcccgaatgcggagacattcgcgctcgcccgcgatcttgcccaggtcgaaaccagcacgatcgcaaacgcgggccacgttgcctcgatccaggtgcccgaacgcgtggcggaagcggtgacggcatttctgagttcaaagaagaaggcggcttgacaacaacgacagggggagaccatggagcaggcgaacgcagtgccgttcgacgaagcgccggtgacgacgcgctattggctatcgatcatccttttcgctatttccggcgtggtcgatttctttgatttcttcgtggtcgggtttctggtctcggtgctggcgccgacatggcacctgacgttcgggcagacctcgatcatgctgatgagcgccgggatcggggcgatgctcggggcgttcgccgccgggatccttgccgatcgtttcgggcgcaagccgctggcggtggcgggcgtcatgctgtgcggcctgacctcgggcgcaatcgcgttcattccggaagacggctggattgcgttcgcggtcctgcgcttcttcgtgggcttcggcctcgccgcgggcgcggccgcggcggttccggccatcgtcgaattcgccccgacccgtcatcgcacgctggtcacgagcctcgtggtcgtgccggtcgccttcggcgtgctgtcggcgtcggtgacggcgagcttcctgctgccgctggtcggctggcgcggattggcggcggtcggcttcctgccgatcatcctcggaattctcaccatgatcatcatgccggaatcgccgcgctggctgatcagcaagggccgcgtgcgcgaggcgcaggcgagtatccggaaactctaccgggtcggtggcgacacgttcgcgttgcccacgctgcaacaggcgagctccgcaacatttgccgatctcttcgccgagcagcggcggttctggctgaccgttctggtctggttcggcgccagcacggcgaactacggcgtcttcctgtggggaccgaccatcgtggcgctgctgctcggcgttgcgccgcaggaggcggccaagatgttcatctatgtcagcctcgccggcgtcctcggtcggaccggctttgccttcctggcgcatcggatcggccgcaaaccgtgcggtcagttgatgggctacggcactgcggtcacgctggcgctcgccgcctatttccacaatgactttgccggttcggtgccgctgtttctggtgttcctgatcatcggcgccgtgttcttcgacggcgggttctcgaacatcgggccctatcccgcggaaatcttcccggtccagctttcggggcgcgcggtcggcctcgcccagctctcgaacggggtcggcaagatcgtcgggccgctgtgtcttgcgttgatcgcgggggccgacaatctcgtgcatccgagcgcaaccgccgcggcggtgatgccggcgttctgctttctcgccggcgcaggccttctgattgggctcgccttcacgttcctcggcgtcgagccgcacggtcgcccggtggctctgttcggtgagaatgcgggcgccgcaccgaaatcgctggccgcgaaaacggcaagttgagaagacgaagggtcatatcatggacaatgcgcacgacacgatcgcaaccgcggcgccgttcgacaccgcgaagctcgaccggctgatggacgaggcggggctcgacatcctgatcgcaacctcgcgtcacaatgtgcagtacctgctcggcggctatcgcttcttcttcttcgaagtcatggaggcgatcggcaccagccgctatctgccggtgttcgtctatcagaagcggcatccggaaaatgcgatctacatcggcaaccgcatggaaaagttcgagcacgatctcggacggatatggacaccgctggtcaagacaggcagctggggaacgatcgatgcgatgggcctcgcgatcgatcatgtgcgcaagcttggggctccggcaaagcgcgtcggcatcgaggcgagcttcctgccggccgatgccagggatcatctgcgggccgggctcgacgatgtcgaactgcgcgaagctcatttcaccctcgaacggcttcgcgccgtgaaatctcccgccgaactcgatctcatcagggaagcctctgaacgcgtcgtcgatgcgatgctggcgacgttcaggaactgtgtgccaggcatgaccaagaacgaggtcgtcgcccgcttgcggcatgaggaacaggcgcgcgatctggtgttcgaatattgcctgattgccgcaggcaacagccataaccgcgcgccctcgaaccagcgcctcgcggaaggcgacgtgatctcgatcgattccggcggaaactaccggggctatatcggcgacctcagccgcatgggcatcctgggagagcccgacagcgagcttcgcgaattgctgcacgaagtcgaggacattcagcaggccgcccggcgcgtgatccggccgggcgcgatgggcggcgacatcatcgcggcaggtgaggctatggtcaaatcgtcgccgaaccgcgccgtgctcgacttcaccgcccacggcatcgggctggtcagccacgaggcgccgcggctgaccgcgaccggtccggtcccttacacgccatatgacgccgaccggccgcttgagccgggaatggtgatctcgatcgaaaccgcgctgctgcatcctgcgcgcggttacatcaagctcgaggacacgctgatcgtcaccgaaacgggctgggaagcccccggtgaccatggccgggaatggaattcgtcgcgtctcatggcgtgagccgatcaacgccggggcggcatgtttggatggggcaccgattgagctgcggtgccggaggcgttcgcccgcatatttcggaatattagaaatatatccctgagttgcccgacgtgtcaagttgctggccgccgccggctcctttgcatggggttgttttcgatattttggcagcgtccgcccgccggcggtctttgcttcactcgcgcctccggtcatgcgatgcttcgggcgggatgcagcggcggtcccgtgccgtctgctcgccaggtcggcgccgacgatgggcaggtgcaaccgataaggattgcctcccatcgacagaagcgacccgatgaccgccaacgcactccgcgactacgcccaaagcatcctgaccgcacgggtctatgacgtggcggtcgagacgccgctcgatccgatgccgcggctgtcagagcgcttgtcgcgatccgtgttgctgaagcgggaggattttcagccgatcttctcgttcaagatccgcggcgcctacaacaagatcgtcaggctgccggacgcgcagcgacggatgggcgtgatctgcgcatcggcgggcaatcacgcccagggcgtcgcgctgtcggcgcgcaagctcggtattcccgcaaccatcgtgatgccgcggacgacgccggccatcaaggtcgaagccgtgcggcgtctgggcggcgatgtcgtcctgcatggcgacgcgttcgacgacgcgcaagccaaggccagggagatcgaggtcgcgcgcggcctgaccttcgtgcatccgttcgacgaccccgatgtgatcgccggccagggcaccgtcgggatggagatcctgcgccagcatcccgatccgatcgaggcgatcttcgtgccgatcggcgggggtgggctggcggccggcgtcgccgccttcgtcaagttcctcaacccttcgatcaaggtcgtcggcgtcgagccggcggatgccgcgtcgatggcggccgcgctcgccaagggcaacgtcgtcgcgcttgatcaggtcggactgttcgccgacggtgtcgcggtccgcaaggtcggcaccgagacgttccggctctgccgcgacctgctcgacgaggtcgtcaccgtggataccgacgcgatgtgcgcggcgatcaaggacatcttcgacgacgtgcgatcggttgccgagccctccggagcattggcgctcgccgggctgaaagcctatgccgagcgcggtgcgctgagcgacggcagcctgatcgccgtcaacagcggggccaatctgaatttcgaccggctccgcaccatcgccgatcgcgccgaggtcggcgagcatcgcgaggcattgcttgcggtcaccgtgccggagaagccgggcagctaccggcacttcatccgcattctcggctcccgcgccatcaccgagttcaactaccgctttgccgagaccaccgcgccggcgcagcttttcgtcggcatcgcgctgagccgcggtgaggccgagaagcgggaggtgatggagctgcttcgccgcgagggctatccgatcctggacctgagcgagaacgaaatggccaaggaccatgtgcgctacatggtcggcggccgcgcgccgctgctcagggacgaggtgatctaccgcttcgagtttcccgagcgtcctggtgcgctactgaaattcctcgagagcctggcgccggactggaacatctcgctgttccactaccgcaatcacggcgccgactatggacgcatcctggcggggatcgaagtcaagccgcaggagcgcgcccggttcgtccaagcgctggatgcgctcggctatccctactggaacgagagcgagaatccggcctatcgcctgtttctctccgccgagcagggatgacgcggcggggcgccaccgagatcgcgatctggcggatcagcgatcggcggtcagttgccggcgatatcgctcggcgtcccagttgagcagcgcatgctcattctctgccgtcagatagttgacccgtgcagtcaggggcagccggctggtaaccagcgcgagacagctcaacatggcttcggcgccgtcgctggcatcctcgcggatgaggctgccgacatcggggacgagaagcgcaaccggcggcggcaggccgatcgcgatggtctctgcggtcctgacgttcaggctctcgtgaggctccaggaccggcaggcccgggccaaggaagacgacgtgatcgggatagagcgagccggcggtcgcgatcgcgcggctgtagcggtcggtggcaatgtcgtggccgcgcggatcgcgcggcaggcgatagatcgtgccggcgcagatcctccggagcgcgtcatgatccgcggccggcgcgcgacgctgctccagcgccaggcgcttttcgacctcggccaccaaggcttccgccgcgtcgcaggtcgtggcgccaaccaccaggccgtgattgccgaggatcagcacgtcgatcgcatcccgtgcgatcacctcaccgaccgcgcgggccagcggcagtcccgggtggtgatagtcgaggtaccgccaggccagtccgtccagacgccgggcaaactcgtcacgggcatcgctgcgcaccgcccacgcgatggtgttgacggaatgaacatgcagcacgatcctgtgcggcatcagcgcatgcagcgaggtctcgatcgaggcgcgcagcgtcgttccggcgtccggcgcgagcggcacgcgttcgtcgccttgcgccagggccgcgcgcgcggccgacagggcgaccggcacgaagatgtccttgtcctcggcgtcggcgagccaggtgcctgacgccttgacccacagcacgtcgtcctccttgactgatgaattgccgccggcgccttgcaccagcaggatattccggccgacgcgtgccgacatgcggcacagttcgttcagcatttgaggcggtcgcatctcggctctcaccaggtcagatggtccatggtccagtgcggcatccgcgccgctgcgccggccgcggccttgatcgcctgcggcaggtcgtgcgcctgcgcaagcgtcgcgcgatgggcgccggagccgatcagcagggtcagcatgccggccgtgcggcctccggcgatatcgtgatcgagggagtcgccgatgacgaggattcgctccggcgcgggacgtcccaattgatcgcgcgcggcggtaaacatcggtggatgcggcttgccgacgaacagcacggtgccgccgagcgattgatagaaggcggcgagtgcgcccggtgcagggatcagtcccgcgacgccgaacatcacgaggtcggggttggcgcacagcatcgtcaattgccgggcagcggccgccgtcagcagcgagcgccagcgttccggctcggccatatcatcgtcaaggccgccgagcaggatgaaatcagcctcgtgtacggtcgaagcgaccgtgaggccggtgtcgtcgacgatcgagcgatcgccgtcgcgcgagatcagaaagcagctacgtccgatttcggcaaagggcgcctggtcgcacgtgtgcaggccgcgccaggtgacctcgcccgacgacagcacgccgtcataggcctccggcggcaggccgagtgcggcaaggcgccgctggttgccgacggcgcgcttgccggaattggagaggatcaggatgtgcttgccggccgtgcgcagccgcgccacgcaatccagcgctgcggggaacaccgccaacccctcgtgcagcgtgccccactggtcgagcagcacgtgatcgaagcggtcggcgatgacatgaaggccggcgatcgcggtcgcatcggccttcatggcggacctccgttcagcgcgagcagcgcggcgccgtagcttgcttcggtctgttcggcgagcgagaccgggacgccgagcacgcggtgccggatcctggtccatgcatcgttcttcgcgccgccgccgattccgatgacgcggcgcagatgcggtgcgccgagtcgcgccagctgccggtaggcgagggcttccaccgaggcgatgccctcgagcaggccctggaaaaaacgacaatcttcggccggtcgcggcgtgatccgcgcggccagcgccggatcggcgatcgggaagcgttcgccgggttttggcagcgggtagtagtcgagcccggtcggctggtccggcatcacctgcggcgtcagccgatccatctcgtcggcgctgaaatgcagcagcagcgcggcgccgccggagttcgatgcgccgccggcgagccagcgctcgccgagccggtgcgaatagacaccctggtcggccgcgaagatcggctgggtcgtaagctgtttcaccaccagcgtggtgccgagcgaggtgacggcatcgcccggctgatcggcaccggtcgcgatgaaggccgcgacgccgtcggtggtgccggccgcgacgtgagctgtggcgggcagcccgagtgagcgcgcgacctgcggatccatctcggaaaatgccgttcccggcaccagcacctcgggaagcagatcgtcgcgcacgccgagctggtcgagccaggacggccaggcgcgcgcgaccgggtcgtagccgagtttcaacgcgttgttctcgtcgctgatggcatggtggtttgcaagccggccagcgatccagtccgcttgatgcaccgcgtggcgcgcatcgccgatgtagccgtcgttctggagataaagcagcttggcgagcgcgctgctcgcaccatgcgcgccgctctcgcgcggtgcgactgccgccacgcgtgcggcctcgtgcgtggcgcgcgcatcattgtacatcagccccggcgagcaggggcggccggccgcatcgaccagcagcagcgtgcccgatgtgccgtcgacgacgatacgcgtgacgtcgccaagaccgacggtctcgccgagcttgcggatggctgcggccgcagcctgccaccacagctccgggttctggtcgatggcgttgccgtcgacgcgcggcgcaggcagcgcgatcgaagcgaagccgcggatgccgccctgcggatcgatcgcacaggcgcggacgccgccggttccgacatcgatgccgagatacaagcctcccatccgacctcaccgctctctcgtgcccgcgcttcgacgttggttgcgctgcagcacgtttgggggattgacgccccgttcggcctctgcaattttttgcaggacgtgaagaaatttgcaagcggacttttccggacatggccacaccgcccgacaggctgccgacgatcgacggcgaggcgtcgcttgcgacgcgcgcggcgtggttgtatttcgcggccgggctgacccagtcggaggtcgccgaccgcctcaacatccagagcaccaaggcgcaccgcctgatcgcgcgcgccagccgcgagggcatgatccgggtcttcgtcgaggggccggtcgccgaatgcgtggcgttggagaacgatctgacgcagcgcttcggcctatcgttctgccgcgtcgcgcccgatctcggcgagagcgatctgccgctcaaggcgctggcgctggaaggcgcgagcttcctgcgccagatcctggagcgaggcgacgacaaggtgatcggcgtcggccatggccgcacgctcgccgccgtggtcgagcagatgccgcagaccccggcgcgcgacgcgcaattcgtgtcgttgctcggcggactgacgcggaaatttgccgccaatccgttcgacgtgattcatcgcctcgccgaacgtaccggcgcggaagcatatctgctgccggtgccggtgttcgccaattcggtcgccgatcgcgccgtgctgatgcagcaattcggcatcgccgacgtgttcgcgctggcccgcaaggcctcgctgctgttcgtcggcatcggccaggtcagccatgacggctttctggtggcgagcggaatgatcaagcccgacgaggtcgccgagctgaagcgcgtcggcgcctgcgcggatctgctcggccatttcttcagcgccgacggagcggtgctggacaccgatctctcggcccgcgccacctccatgagcatggccgatctcagaaagcaccgcatcgtcgccatcgccggcgggccggccaaggtgaccgcgctgcgcggggtgctgcgcagcggcgtgctgcacggcctcatcatcgacgaggtgactgcaaaggcgctcacaacagacaagccggagaccacatccggcaagacaagaagcaagacccggaaggacaaataaaacaagcgtcaacaaggagaggaaatacatgttcgatcgcgagaagaatctgttcgactcctacgctgccaaacgcatcagccgccgcgatctcctcgacggcgccgccaagctcggcatcaccggccttgccgccaacgccgccttcgcctcctcgatgtcgaaggcgatggccgcggacttcaactggaaggcccaaagcggcaagagcgtcaagctgttgctcaacaagcacccctatgtcgatgcgatgatcggcgacatcgaggcgttcaagacgctgaccggcatgaacgtcacctacgacatctttccggaggacgtctatttcgacaaggtgacggcggcgctgtcgtcgaaatccgaccagtacgacgccttcatgaccggcgcctacatgacctggacctacggtccggcgggctggatcgaggacctcaacacctacatcaaggatcctaccaagaccaacccggccttcgcctgggacgacgtgctgccgggcctgcgtgcttccaccgcatgggacggcgtcgccggctccgagctcggctcgggcaaggccaagcaatggtgcatcccgtggggctatgagctcaacaacatcacctacaaccgcaacgtcttcgacaaggtcggcgtcaagccgccgaagaacctcgacgagatgctggaggtcgccgccaagatcacaaaggacgccggcgggccctacggtgtcggcgtgcgcggctcgcgctcctgggcgaccatccatccgggtttcctgtcggcctattcgaatttcggccagaaggacttcgtgatggagggcggcaagctgaaggccgcgatgaacaccaaggcctccaaggaattccacgacaaatgggtcaagatgatccagacctcgggcccgaagaactggtcgacctacacatggtaccaggtcggcaccgatctcggcgccggcgcctccggtatgatcttcgacgccgacatcctcggctacttcatgaatggtggcgacaacaaggaaaaggggcatctcggttacgcgccgtttgccgccaatccggccgccaaggcgccgaccccgaacgtctggatctggtcgctcgcgatgtcgaccttctccaagcagaaggacgccgcatggctgttcatgcagtgggcggcttccgtcgagcacgacctgttcggcgcacgcaagatggacttcgtcaatccggtgcgcgcctcggtgtggaaggacagcgagttccgcgaccgtatcgcgaagtcctatcccggctatctcgaccagcacgacatgtcgtcgcccggcgccaagatctacttcacggcgcagccgctgttcttcgatctcacgacggaatgggcggcctcgctgcagaagatggtggcgaaggaggtcagtgtcgacgaggggctcgacaagctcgccgacagcatcaaccgccagctcaagcaggccggtctcggctgacgggccaactgtgcggtgcttgatcccccgcaccgcacccatccgccggctcggagccttgtcccattccgagccggcggcgttttgccagccaaacgcgatctcatatcatcatgagcatggtccaactcctccagacgaacgcgcaggcagcgccggccaaaccaaggccgcgcgtgcgcctcttgccctatctgctgagcctgccggcgctgctcgtctgcgtggcgatcctggttccgttcgtgaccgcggcggtctattcgctgcagcgttaccggctgaacctgccttatctgcgcggcttcatcggtgccggcaactacatcgacttcctgtccgatccggcgttctggaatacgttccggatatcgatcacctacaccgctgtgacggtcgtgctcgagcttttgctcggcctcggcatcgcgctgctgctgcgccggccgacccgcttccacaatgcggtgtcgatcatgctgctgctgccgctgatgacggcgccggcgatcgccgcgctgatgtggaagctgatgaccaatccgagcttcggcatcctgtcctacctggtcggcctgttcggcgtcaccgacttcaaatgggcctccgatccgtcgagcgcgctgttcacggtcgtgctggtcgatgtctgggtctacacgcccttcatcatgatcctgctgcttgcgggcctgcgctcgctgccgcggcagccgttcgaggccgcggcgctcgacggtgtgccggcgagcttcgtcttcttccggatcacgctgccgatgctcgcgccttacatcatcacggcatcgctgttccgcctgctcgattcgatccagcagttcgacatcatctatgcgatgacgcagggcggaccgggtgaccggctgatggtgttccaggtgcaggcctatctggaattcttccagtacaccaatgtcggcaggtcggcggcgctgttgatgatcctctggctcatcaccaacatcctgtccaacatcttcatcaagaactggctgcggttgcgcgcgcgtgcgcacggccacgcgtgacggggagaggcgcgatggaacattccagccttgccggccgcatcttccgcggcgtggcgctcacgctgatcctgatcttcttcatgtttccgatcgtctggatcttcctgatgtcgttccagaacaacgatcagatcctgagaattccgcctcggatcctgttcgagccgacgcttgcgaattacgaggcgctgatctccggccagctgcgcaccgcggccggcaatctgcagatctccttcatgcgcaacctgttcaacagcgtcgtgctctcgagcgcggcggtgctgctggcgctgctgctcggcgtgccggcggcctacgcctttgcgcgcttcaagttccgcctcggcgagagcatcgccttcacgctgctgtcgttccgcttcgcgccgccgttgctcgtgctgctgccgctgtcgctgtactatcaggagctcgggctcaacgacacttacttcggcatcgtctgggtctatcagctgatcgcgctgccgctgatcctgtggatcgtgcgcggctatttcgaggatatcagccccgatatcgagcacgcctaccggctcgcggggcattcctggcgcgaggccttcacccggatcgcggtgccgctggcagggccgggaatcgccgcggcggggctgctgtcgttcatcttctgctggaacaatttcgtgttcgccctgatcctggcttccgccgacaagcagccggtgaccgtcggcgcgctcgccttcgtcaccgcgtccggaatccagtacggtcagatcgcggcggcgatcgtgctctcggtgacgccgaccctgttgctggcgctctatgcgcagcgctatctggtcgaggggctctcgctcggcgcggtgaaaggctgatccgatggcacgtctcgagatcaatgcggtgagcaaggcgttcggtgtggcgcggcccgccgacggattgtcgctcgccgtcgagcctggcgaaatcgtcgcggtgttcggaccgtccggcagcggcaagaccgtgctgctgcggatgatcgcgggcatgttcgagcccgacgacggtgacatcctgatcggcggccgctcggtggtcggcgcgccgcccgagcggcgtggcatcggcatggcgttccagaattttgccctgttcccgcacatgaccgcccgcgacaatatcgcaagcggcttgcgtgccggcggcaacgaagttgccggtcgcgttgccgcgatcagcaagctgctcaagatcgagcacgtgctgggccatacgccgcgcgaattgtcgaacggacagaagcagcgcaccgcgctggcgcgggcgctgatcggcaatccggacgtgctgctgctggatgatcccctgcgcaacgtcgacgccaagctgcgctacgagatgcggctcgagctgccgaacctgctgcggcgcgggaccgccgccgtgctctatgtgacccaggactatcgcgaggcgatggcgatcgccgaccgcatcgcggtcttgatcgacggccggctcgcgcaggtcgcgacaccggcggatatctacgcccagcccgggtcggtcgcgatcgcgcggttgttcggcgatccgaccatcaaccttgccgaggtttcgccggtcgccgagcacggcatgctgtcggccgtggtggccggcgcccggatgcggctcggcgccgccgatggcgcagcgcctgccggtccatgctggctcggcgtccgaccggaggatatcgcgatctcgtcggcatctgcggacgacgccatcccggcgcgcattctcgcgatcaccccgatgcacgagagggcggtgttgctgctccgtcttgccgacggaacggaatggctggcggcgctgccgccggatgcgccgcaaggcgtggccgatgatagcgttttcgtccgcttcgcggccgatgcagcgatgctgttcgatcgcgcgaccgggctccggatcgcgccatcgtgccggcttaaggcggcataggagcggatgatcatggacatgctcgaacttcgcggcatcgacaagctctatcgcagccgcggcaaggtgccggtgcacgcggtgcgggcgctcgatatggcggtcgagaagggcgagatcgtcgcgctgttgggatcgtcgggctgcggcaagacttcgaccttgcgcatgatcgcgggtttcgaggacgtctcggccggatcgatcgcgctgggcgggcggccgatccacgtgctgccgccggcgcgccgcaaggtcgcgatggccttcgagggctactcgctctatccgccgctcaccgtccgcgaaaacatcgccttcgcgctgaaatccgcccagctgccgcgctctgaggtgacgcgtcgggtcgacgagattgcccgcctggtcgagatcgaggacatcctcgacaaatatccgcgtgcgatctccggcgggcagcagcagcgcgtgtcgctggcgcgggcgctggtgcgcgacgccgatctctacctgctcgatgagccgatgggccagctcgaaccgcagttgcgcgcggtgctgcgtggccggatcaagagcctgctcgccgagcgcggcatgaccgcgatcttcgtcacccacgaccagaccgaagccagcgcgctggccgatcgcatcgcggtgatggaaggcggcgtgctgcagcaattcgccagcgagaaggaactgaagggccggcccgccaatttgttcgtcgcgagcttcatcggcgagccgccgatgaacctgttcgatgccgaggttgcgcggtcggacggcggcttccgcctgtcggccggaaccgacatggccttcgatatcaatgggcttgacggtgcggcagctaaggcgctcgccggcacgccgcaggtgcgcatcggcattcgtccgcagaagatcgcggtcggcgccggcgacatcaaggtgaaggtcgtctccaaccaatggctcggcgatcagtcgcatatcgccggtgattgcggcggccgcatgctgatcgcggtcacgccgggccgcgtcgcggcgcggccgggcgaaatcgtttcgttcgcgctggagccgcgtcacctgcacatcttcggcagcgacggaagctgcatccgccatgcggaggtgtcccgaccatgaccgcgtcagcacgccgcgacgtcatcatcggcatcgatgccggtacctcgctgatcaaggcggtggcgttcacgctggccggcgagcagcttgccgacgtctcgcggccgaatgcgtacagcagcgcgcccggcggccacgtcgagcaggacatggcgcggacctggagcgatacgatcgcagtcattcgcgcgctcgcaacgtcagtacctgacttgtccgcacgcattgcggcgatcgcggtgaccgggcagggcgacggcacctggctgatcgacgatgatggccggccggttgcgccggcgctgctgtggctggactcgcgagccgggcggctggtcgaggagatccgctcaagcgagcgcaacgcaccgctctatcgccgcaccggctccgggctgaacgcctgccagcaaggaccacagctggcgtggctgcaggcgcacatgcctgaggcgatcgccagggcgacgacggcttttcattgcaaggactggctctatttcctgctcaccggcgagcgcgccaccgatccgtcggaagcgacattctcctgtggcgatttccgcaagcgcggtttcgacgcggagaccgcagggttgatcgggatcgccgacctgacgcggctgttcccgcccgtcgtcgacggtgcggtcatgacgcatccgctcaccgcagcggccgcgatcgagatcggcctgccggcgggcgtgccggtctgcctcggctatgtcgacgtgatctgcaatgcgctcggcgccggcctctacgatccgtcacccgatgtcggctgcaccatcatcggctcgaccggcatgcatatgcggctggtgccaagtgcggacgcggtgacgctgaaccgggaggcaaccggctacaccatgccgtttccggtgccggggcactatgcccagatgcagtccaacatggcggcgacattgaacatcgactggatgctcgatctcgcctgcgacttgctggcggcggagggcgtgacgcgcacgcgcaccgagctgatcctccggctcgacgaccaggtgctgcgggccaggcccggcgaggtccttttccatccgttcatctccgatgccggcgagcgcgggccgttcgtctcgcatgaggccagcgcacaattcttcggcctgcgctcgcgccaccgctatggcgatctgatgcgcggcgtgatggagggcctcgccttcgccgcgcgggattgctacgccgcgataggcgcgctgccccgcgatgtcaggatcaccggtggtgccgcgaagagccgcgcgctcggcgccattctcggggctgcactggattgcgaggtccggatctgcagccgggccgaggccggtgcggcaggcgcggcgatgatcgcggcggtcgcgatcgatgcccatcccgacatgcgcgcctgtgcggaacagtgggtcacaccgcatctgagcgcgccgcaatcgccggacgccacgctggcaaagcgctacgccagcatctttccaacctatctcgatgcaaggctggcgtcgcggccggtctggaagcaactcgccgcgctacgcgccggagacgaccatgtctaactccatcgccatcgtcggcgaccgtttcatgctgccgtcggtgtttgccgagcatatccgcatcgcttgcggcaacggcgtcgatatccgcaccctggagcagccctggccggacgagccgatggagcatggctacgccggctcgaagctcgacggcctgaaggaattcatggggcagcctgacgagatcatcgacttcatcggcgatgccgggctgctggtcacgcacctcgcgccgatctcgcggtcgatgctggcgcggttgccgaagctcaagttcatcgcggtgtcgcggggcggccccgtcaacatcgacatgcaggcggcgcgcgaccacaacgtgctggtggtgaatacgcccggccgcaatgcgagcgcggtggcggagttcaccgtcggcgccattctcgccgagacccgcctgatccgcagcggccacgaggcactgcgcggaggcgaatggcgcggcgatctctatcgcgccgaccgcaccgggcgcgagctcggcgagatgacggtcggcatcgtcggctacggcgcgatcggcagccgcgtggtcaagctgctgaaggcgttcggctgcagaatcctggtcgccgatccctatgtccagctcagcgcccaggaccgcaatgacggcgtcgagcatgtcgcgctgggcgagttgctcggccgcgccgacatcgtcacgctgcatgcgcgggtcacgccggagaccacccgcttcatcgggcgcgacgcgctggcgcgaatcaagccgggcgcatacctgatcaacaccgcgcgcggtccgctggtcgactacgacgcgctgcatgatgcgctggcatcggggcatctcggcggcgccatgctcgacactttcgcggtcgagcccgtcccggcggactggccgctgttgcggcttcccaacgtcacgctgacgccgcacatcgccggcgcctccgtgcgcaccgtcaccgtggccgccgagcaggcggccgaagaggttcgccgtttcctggccggcgagccgccacgcaatccatgctgaagagaaaggcagtccgaatgacccgtgaggaacgacaattgcgcgaggctgttatcgccaagtgccgatggatgaatgcgtcgggactcaaccaggggacatcaggcaacatctccgcgcgctacaaggaccggatgctgatcacgccatcggcgaccccctatgattcgatgaagccggagatgatcgcgtcgatgccgctcgagggtgactatggcgcgtgggaaggaccgctgcagccgtccaccgaatggcgcttccatctcgacatcacgcgcgcgcggcccgatgtcggcgccatcgtccatacccactcgacctatgcgaccgtgctcgcgatcgcgcgcaagccgatcccggcctgccactacatgatggcggcattcggcggcaccgacatccgctgcgccggctacgcgcgctacggcaccaaggagttgtccgaccacgcgatcgcggcgctggagggccgcaatggctgcctgctcgccaaccacggcatgatcgcgctcggcgccaatctcgacaaggcgatgtggctcgcggtcgagctcgagaccatcgcgcggcagtactatctctcgctcgcgctcgattcgcgtatcatcctgtccgacgaggagattgccgacaccgcgaaggggttctccacctatggcttgcaggcgccgaagccgagcaaggcgcgtgcgacggcaaaggcggcgccacgccgcgccgagaaacggcgtagcaacaagcgatgaagggcactgcgccggtcgcaggcagggatcacgggctggtcgatatcgctgttatcggtggcggcatcaacggcgccggcatcgcccgcgacgccgccggccgtggtctgaaggtcctgctctgcgagaaggatgatttcgccgagggcacctcgtcgcgctcgggcaagctgatccatggcggcctgcgctatctcgaatattacgaattccgcctggtgcgcgaggcgctgatcgagcgtgaagtgctgctggcttcggcgcctcacatcatctggccgatgcgcttcgtgctgccgcattcgccggagcagcggccggcctggctggtccgcaccgggctgttgctctacgaccatctcggcggccgcaagcagctgccggcgagccgcggcctggatctgtcgcagggtccggagggcgcaccgctacgtcaagagttccggcgtggctttgagtattcggattgctgggtcgatgacagccggctggtgatcctcaatctgatcgatgcagcacggaatggcgcctgcatcctgtcgcgcacgcgagcgctgcgcgcgcgccgggacggcgagacctggctgctcgagatgcagggcgatgacggaacagcgcaggtcgtgcggtcgcgagcgctggtcaacgccgccgggccatgggtgcaggatgtcatccagggcgtgacgggactgaactctgcccagaacgtgcggctggtcaagggcagccacatcgtggtgccgaaattctggaacgggccgcaagcctatctgctgcagaacagcgaccgccgggtgattttcgtcaatccctatgagaatgatctcgcgctgataggcaccaccgacattccatatgatggccgtgccgaggaggttgcgatcggcgcggacgagaccgactacctgtttcaggtgctgcgccgctatttccggatgccgccgcagccaagcgagatcgtgcacgccttctccggcgtccgcccgctctacgacgacaatgccgacaatccatcggccgtgacgcgcgactatgtgttcgaggttcacggcgccgagggggcgccgccgctgctctcgatcttcggcggcaagatcacgacctaccggcggctggctgagcaggcgatgcagcgcctcgcgccgtggtttgcgaagctgtcgccggcctggaccgctgacaggccgttgccgggcggcgacatcggcggcagtttcgatgattttgcgcgcgcgctggcgcgcgactatcgcgatctaccgcaaaagcttgtccatcattatgcgcggctctacgggacgcgcgcgcgcgaactgctgggttcggcccgggtcctggccgacctgggccggcatttcggcggcgatctctatgaatgcgaagcggcgtatctgcgcgagacggagtgggcgaggaggcctgccgacttcctggatcggcgcaccaagcatggcctgcatctgacgccggcgcagcggttggcgttcgagaattacatccaaagcgcgatgagaccggagtgaagcgtcatcgcgctttagctccttgtttgagcatgatcttttcggaaaaccgcttcgcacttttccggatctaggctccatcaggcaatcatggggatgcggaaccgccgagccgagaacgaacgttgctcccgcggggccagcctgatgcgggatcgcagcatcgggatcaaacccgcagtgtttccctcaggatccattggcggaacgcatcaagcggtgccaggcttccgttctccggccgataggtgagataccaggctgttcccctcaccatcttcggctcttccaccggagcgataagccgggcgtcccgcaactcatcttcgatcaggttgacgtctgcgagtgcaaagcccagtccctgcaccgccgcctggatcgggagcgttgagttgccgaaattgagccttcgccgaatgcctgtcgattgcttgataccagcgtgagcaaaccagtcgttccaatcgttcggcgcaatggctgaaaacaacagcgtctcggcgagcaggctatgcgatgtccgaaccggcggacgagatgaaagatagctcgggctgcacacgggcagaatggcatctccgaacagatgatccgcgatcagtcccggccattcgccccgtccgtgccggatcgccgcatcaagcccctccgcctccagatcgacgggtcggcgtgctgtcgaaagctgaagctcgatttgcggattctcaagatgaaaccgctgcaggcggggcagcatccagccgatcgcgaataccgcgggcgcggtcgccgcgacgacgtgacggcgttgcggatgcgcgacccgtgcggccgcgatccgcaaggcatcgaatgtggcagtcacgtccggcaggaaatcgcggccctcggtggtcagaaccaaagcacgcggtaggcgctcgaagagcagcgtcccgatgtgctgctcgagtttcttcacctggtggctgatcgcgttcgccgtcacgcccaactcagctgctgcggcagcaaagctctgatgtcgggcggcagcttcaaaagctcgcaagctgttgagcggaggcaaggtttcactcttcataataggctcaatttaacttagccataggcgaaataaaactggtttgacgcatctaattctatgcttcagcttctccgcacctgaaaagaacacctcaaatgatgtgggaatatctgtgagccgcgaagcagcactgcgtgccgcccaggagcacttttccggcggacagttcgttgacgatctttgccgtcgcgtggcctttcccacggagagctcggttccggagcggcagttcgtactgctcgattatctgaaacaggagatggtcccgacgctggagcggatgggctatgcgtgccgcctggtcgacaattcggtggcgagccgagcgccgttcctgatcgcgagccggaccgaggacaagggcttgccgaccgtactcacctatggtcacggcgacgtcgtgcaggggttgcccgatctttggagtgagggcctatcgccatggaaactgacccggataggtgaccggtactacggccgcgggactgcggacaataaggcccaacacagcatcgtcatcgctgcgcttgaaacggtgctcaaggtccgcgggaggcacggcttcaattccagaatcctgatcgacatgggcgaggaagtcgggtctcccggactggctgaggtgatcggcaaccacgccgacgagcttcaggcggacatctttctcgcctcggacggtccgagaatgaaggttgagcggccggatatcaagctgggcaaccggggtgtgatgtcgttcgaccttgtggtccacctgcgcgacggcagtcgccattcgggccattggggcggcgttctggaggatcctgcgatcatcctcgcgcatgccttgacctgcatcaccacaacgcgcgggcagatcctggtgccggaatggcgacctgacgcgatcccgccggcggttcgagccatgctgctggattgcgcggtcgatccaggatttgatttcccgcacattgccgatgattggggagagcctggcctgacacgtgcggagaagatgttcggctggacgagcttcatcgttctcgccgtcgtcgccgggcaacccgatcggccggtcaacggcgtccagccgtttgcgcgcgcgacgtgccagttgcgcttcacggccgacgtggacagcggaaaatttctcgacggcctgcgcggctttctcgatcagaacggcttccagcaggtcaagatcgtcgcacgggaaggcgactttcatcccgcctcgcgtaccgatcctgccagtccctgggtggattgggcggttcagtccatcgcgcgtaccgtcggcgctcctccgattgtggtgccgaacggagccggctccttgccgagcgacgcattcgcccgtcagctgcgcgtgccgacgatctgggtgccgcattcctacgcagggtgcaagcagcacggtcccgatgagcatgtgttgggaccgctgatacaagaaggcttgcggatcatgaccggcctgttctgggatctgacgccggcggcgcacgatggataatattggaccggtgcactgacgatggtggcagccgctcatcagcagaccatggtggagacgggaattcggaggagttcgtcccgccaccctgtcacgatcatgctgttcatgattgtcctcgcggccggcctgacgttcgttctgccgtcagggctttacaaccgctcgccgacgggagcagtcgaaccgggcagctttcatttcatcgcgaaagaccgtcgcattggtgcgctgttctcaggcgaagcaagcagtgtcgcggtcgctgcacccgcctccgtggtcacgacgctcaaggcgataccagccggccttacggcgacggcctccctcattttcatgatcacgtttattggcggcgccttcgcggtgttccgaaatacgggagcgctggatgccgggctcgaccgtttgcttgcgttgactggagggagggtgagattgctcattccgctcctgatgctgaccatcgccttcggcgcatcttttgtcggactgatttcggaatacatcgcgttcgtccccgtcgcggttgcgttgggagaacgtctcggattcaatcgtgtgctcgctgccgcaatcgtgatcataccggcgaaaatcggctacctcacgtcggttacgaatccgatcggcctggttgtcgctcaaacggccgtcggtgtccccgtcttcagtggtctcggcgttcgactggcggcgttcgtcattctcctgtcggtcggtgttcttttcgtgctgcataagacggcgcgtctgacgcttggccagcaaccaatcagcgaggcgtcggctcggcggctttcgcaccggcatttggccattcttctcacgattgcagtgttcgtcctttccgtcgtctacggcgtgcggtggcatcattggggacatgcagacctcgctgctgcctacatcgggctcgcgaccgctatcgccctgattgcgcggatccggccgacggaggcatgccagctatttcttgaaggcatgaaggcgatgctgctcgccggcgtacttgtcggactcgccaaggctgtggagctcattctgcgagacgccatggtgcttgatccgatcatctttgcgttgacgagcagaatggcggatctggcgcccccgtccgcagctgcttgtctgatgacgattgagatgatcgtcgatctgttggttccatccacttcgggaagggcggcgctgacgatgccgctgttcgcacctgtcgccgcgctttccggtgtaagtggtcaatcggtcgtcctggcgtttctcttcgggggcgggctgccgaacctgatttcaccgacctctcccaccttgctcgcttttctctccgtcgggcgcgtgcgattcggtgaatgggtcaggttcattatcccgctgttcgcgacgatggtgacgctgtgcctggccatcctgctgctcgcggtcgaatatggctaccgctgaatttgatctggcgcgtcgatcagcgtgttgatcggcgtcggtgccaacgggcctgacgtcgccgatttcatttcggcccatctcgatccggtcaatgccggctcggtgctgcacaatcatctcggcgagctcaccgacgatatgcgcaagcgcctcgtctgtgccatgccggccatccgatcgtcctgacatgagactgttacacggcctgcctatggtctccgcccgaccatgacaatcttgtaacgcgaggagccgagttgaccccggatgcgccagcgcaagcccggagcgcccggctgtgccgtgcgctgatgttcggtgcctgtcttgccttggcggcgccggaagcatccgcagaagggaaacaaatcgactttgatatcgcagctcagccgctggcggccgcgctggagcagtatggtgacgtggctggtcggagcgtgctctacaacagcaacttgacggccggacggcattccagcgccgtgcggggacccatgaccgcgggcatcgcgctcgcgcgcctgcttgcaggcaccggcctgtcggcgcgcgtgcttggagagacgtctttcatcctctatccgacaccggccatggcgcaggcggcgctgccggcgccggtgaatcattattattcgcgactacagaccagccttcgggccgcgctgtgtgcggaggccgatgcgcggccgggcggctaccggatcgcgttgcagttctggattgatccggccggcaaggtcgaacggttcgagcgactgggctcggcgggcagcgcctcgctcgatgctggtattgatcatgctctgcgccggatgcaggtcgatatggcgccgccggcaggccttgcccagcctgtgaccctggtggtggtcccgcagggatccggcatcacgatgggctgtgacggttctccggcacgccatgactgaaacgtcccttgccgtgataagacgcctgttggtggagcgctatgatgagctcaagcgccggctgacacgacggctgggatcgtccgaactcgcgggtgaggcgctgcacgacgcctggctccggatcgcccaggcggattcggttggtgtggtcggcaatcccggcaattacgtttttggcgtcgccatgaatgcggcgcgcgatcgcctacgtaacgccgatagccggattctgagcgccgccgaagtcgacgggttgctcgagatcgccgatggtgcgcccggtcccgagcacgtggcacgcgcgcggtcggacctgcgagggctcgaggccattctgcacgagctgccggcgcgccgccgtgagattctgctcgcgtcacgcctcgaccagatgccgcggcaggaaatagcacgccgcttcggcatttccctgcggctggtggatctggagctgcagcgggcgcaggaatattgtttggcgcggcgtggtcggagcgacggataacatgcggtttcgcccggcaggaaacgtcattgtgaggggggtgatgagaatcgccacgccccggcgtaggcaggcacgaggcggacgccagccatgagcgcgacggataacgacgacatgagatttgatccgctcaagcgggacgcggtcggctgggtgcggcatcttacctccgggcaggccaccgcggcggatgccgaggcgctgcggcgctggtgcgcccagagcgccgagcatgctgccgccttcgctgcagcaagccgcctgtggcgcgaccttgcaccggcgggccgcaatgtgcgggcggccgagatggccagacaatcgcggagcgcggcgcacttgaatcgccgtgtgttgctcggtggtgggctcgcgaccgcggcctccgctgcgggtgtctatgcgctggcgcgtccgccgctcggcctgtggccgtcctggtcggatctcgcggccgactaccgcaccggcaccggcgagcagcgcagcgtggcgctgcccggcgatgtttcgatccggatgaacgtgcagaccagcatcgcgttgcggcccgccgatcccggtgcggcgcggatcgagttgctttccggcgaggctgcgttcgccacagccggtcgcagctttggcgtccgtgcggccgaccgctggatcttggcgaacagggcgcagttcgatgtgcgttatatatcggctggcggcgagcggccggtttgtgtgacctgcctcaacggcgagctgcaggtcgagcgtggggccgagctgatcgccatgaaggaagggcagcaactgcgctacgacgcgcggggagagagccttgccgctgccgatatcgagattgcctccgcctggcaacgcggcttcctgctgttccgcttcacgccgctggccgatgtggtcgacgagatcaaccgataccggcctggccacatcttcattgtcaatgccgagatcgcgcggctgcccgtcagcggtcgtttccgcatcgatcgcatggatgagatcctgacccagatccagcaggcgttcgatgcgcgtgtgcggttgctgcctggcggaatcgtgctgctgagctgactgggttcccacattctcccggccgctctgcggtgacacgaaactttcacaaaaaacccatgcagttttgagcggggcttcccgtcacgctggtgtgacctctgcgatgttcgctggaaggacgtgtcatgccggctcgagctcaaaccacccatcatccccgtgcacgcggtgaattggccggcagcgcgctgtcgcgccagatgtcccgcgccgggttgatggccggcacgagcctggcgacattgttgctcgctgcgcatcctgcgaatgcgaggccgtttggtggcgcatggacggtcgcggcgccacaatacgcggccgatgcggcgagcactggggcccagcaggcagcagacgcggctgcgaggagctcgggagcgctgaccagggcggcccaggcgatccaggccatgcaagcggcgcaggcggccgcgcgcaatgccgcacaggcggccggcacgtcgcggacgctgccgcagttggcggtgcccgatggtcttgcgccgggtgggctgcaggttgcgcccggatccggcctctggtccggtgccaaccttccgacccaagccaatgtgaacgggcgcaccagtgtcgggatcacccagaccgcgccgcaggcaatcctcaactggcagagcttcaatgtcggcgcccagaccgatgtcgtgttcaaccagcagggcaacagcagctgggtcgcgctcaatcgcgtgaccggcaatgtcgggccgagccagatccttggcaacatcagggccgacggccaggtgctgctgatcaaccagagcggtatcattttcggtggtgcaagccaggtcaatgtcgggtcgctggtggcctcgacgctcaatatcaccgatcaacagttcaagaccggcctgctcaatcgctcgccgtttgacaatgccggcaatctgaaggcgccgatcttcggcaacagcagcggcccaaccggcaacgtcatcgtcgaggctggtgccgtgatcgtcacggcgccgcccgcatccgtcaccacgggaggcggcaacgtattcctgctcggcgccaatgtgcagaacagcggcagcatcgtgacgccgggtggacaggccgcgctcgccgccggcacgtcggtttatgtcacgacgagcggcagcacgagccagcagggcctggtgttgaacgtgctcaatggcggcacggtcagcaacaccggcctgatcgcggcgccgaccggaaacgtcacgctggtcggtatgaacttgcagcaatccggtgtgctggtggcgaccacctcggtcaatcaggccggttcgatcctgttgtccgcgcagcagggattgcagggggagtttggctacgacagctcctcgcattatgcggtgtcgacgcagaccggtacggtgcagctcgcgcgcggcagcgtcaccgccgtgctccccgaggaggatggtctcactgcgaaggacacgcagccgcaggcgcagtcgcagattttggtcgaaggcggcttcgtcaacgtgcaggcgggagctgcgatcatcgcgccgtccgggcgcgtggcgctcgaggcatcgagctacggagaccagctctatctgcaagacaatcccgctgccaagatcaacacgaactccaaccgcgatggtgcgcgtgttctcgtcgacgcagggtccctgatcgacgtttcagggttgcagggcgtgccggtcgcggcgtcgggcgatgtggtgcaggtcaacgtgcgcgccaacgagctgcgcgactcgccattgcaacgcggcggcatcctctccagcaagaacgtgtgggtgaacgtccacgaactcaacccggtggcttcggaccgggtctacaccgcgggcggcctgctggaggtgtcgggctggctcggtcaggtcgaccggccgatcgaccagcgcctgaccatgggcggcacggtggtcgtctattccactggcgatgtcgtcctgcgacctggtgcgtcgatcaatatttccggcggctcgctcgcgcaccaggccggctacgtgccggtcacctggctgatcggctcggatggcagaatctacagcgccaaccaggcccctgccgatctgacctacatctcgatcgggggcggctttacggtcaatcatgcccactggggtgtcaccgagtattatgccaatccatttttctccgatcagcgataccagccggcctatctcgaaggacgcgccgccggcgccctgagcgtgattgcgaacgctgccgaggtcgacgcctcggttgtcgcggcgacggtcaacggcccgtatcagcggaccgccaacacgcttccggccggcgcggcgttcaccatcggggcatccgatgcgagcgttgccccctccagcgtggtcgtcgcgccgtcggtgacgccgccggatcttccgagcgtgacgtcgctgttgccggcgtcctggcagcagacggtttatctgccggctgatctgctcgacaaggcgaactatggcagcatcaccatcaatgcgcggggcggcgtggccgatccggtcagcaaagccgtatctccggcgatcagcatcgtgggcggcgccacgcttcaggttgcccccggcggctcgatcgcgctgaattcgtctatcgccctgatcggcgggggaatttcgatcgacggccaactggtggcgcgggccggctcggtcaccgtcaacgctgcgcagaacggatcgacgatctggaccggcgacgtcgaactgcactccggcggagtgatcgatacgcgcggcttgtgggtcaacgatttcctcagcggcagcaccgccacgcctacgctctatgacggcggcaacgtcagcctggccgcctatggcagcgttcggatcgatgccggggcgatgatcgatgcgtcgagcggtggctggatgcagggcaacggccggatcaagaccagcaacggcctgccggtcggaaccggtggcaacatcacggtgatcagcaacggcttcggcgcgacgctgcacaactcggcgacgatcgcgcagagctatccggggcgggtctatctcgacggcacggtacggtcctatggcttcacccgtggcggggcgctcagcatcgccacgcctgcgatccagatcggcggagatgccatccttacgctccgcacggtcagctctatcaatgccgaggggaccagcaacctcacgccggtcgatcccgcgagtgtgctgcggctgtcgccgggcttcttcgccggcggcggcttcagccagtacgcgctctacagctatcagaacctgacggtcgctgccggcaccgatctcgagctgcatggggtcaatctgattccgaatctgcaggccgtatcggcgccgagcggcagcgatgtcgctgatgtcgcgacggcgagggcgctgccctcgtatcagccgtcggcgccggtgaacctggtcctgagcgcgatcgacgccttcaacggcaatctcaatgttcagcggggtgccgcgatcaacgccgatccgcaggcgacgatatctctgcacgcgcgccgtcaactcacggtcgacggcacgatcaacgcacccgccggcaccatcaatctcgatctgaccggcgtgcccggtccctgggttccgattggatcagcggctggtacgccgccctataatgggccgttctatgctgcgacgcagacgctctggatcggagcggacgcccggttgctggcgcctgggctcgtgacctcgacactcgacccgttggggcgcccggtgaacacggtgctcggcggcggacaggtcaacatcaatcaggacgctcagccgtcgctctactatccctattcggccacccagccttatggcgagcaaccgctcggtgtcgtcgtggcgcaagccggggcgatcattgacgtgtcgggggcgtcggggacgatacgccaggccgcgggtcgatccggaacgacccagtcacctattgcgaccgcaggcggcagcgtcgcgatccgggcatcgctcggtctgctgttcgacgccaccatgaaggcgcaggcgggaggggccggggtggcgggcggcagcctgacgatcgatcagacgatcgggagctatgtcgccgacagctccggggtctcgcaatacttgcagccgatcttccagaccatcgtgagccaggcgccgccgctgatgtcggcgggtctgtcgccggggcaggcgatcccgggcaacctgctcgggcagctctacattggcgccgaccagatctccggcggcggcttcgcgtcggtgtcgctcggcgcagtcgatgcgttggtattcaacggcagcgtcaatctcgccgcgacgcgcagcctgaccatcaacgccaccaacatcagcgcgacgccggacgcgagcgtccggctcagcgcgccctatgtcgacatcggcggtggacagcgcaacatcaacgaatattccagcttcgtgccactgggcagctatggcgcaacgcccttggccggcaccgcgcgtctcgaggtcgatgccggcctgatcgacgtcgagggcgggctgcgcagcggcgcgaattacagctatgtcacgaactacctcaatttctacacgccggttcagcgggcggtgtcgctgcccggcttcgccagcatgtcgttcaacagcctgggcgacatccgcctggtgccaacctccaagaatgcgcccctttacggcagcaagacgaccacgctggcgactgccggtgacgtgacgttcaccgggacggaaatctatccggtcagcaccgggccgatcaacaacggatcctcgagcgtatccagtggtcagttcgtgattcaggcgaccggaccgaacagcgtggtcagcttcatcggcaacggccagacgccttacataccgctgtcggtgggtggatcggtgcagatcgtcgcgccgaccatcaaccagggcggcgtcctgctggcgccgctcgggcagatcaccttcggagacccgaagaatccctccggcacgcgcgcgatcaacctgctcccgggcagcatcacctcggtgtcggcgggcggcacgctgatcccgtatggcgcaccgcttggcaacaccgactggatctacggctacgacaacagcggcacggcgaacacgatgagcgcgccgccggccaagacgatctcattttatggccgggcgctgacggtcgcgggagcgtccggtggggtgggctccgcgcgcatcgacgaatccggcggcggcgacatgtacggcgcgcagttcgtcagcggtgctggcggctcggtcgatacgcttgatggcacccagacattcgcgatcctgccgagcctcggtaaccgctatgcgccgcgcgatccgcaaatgcagctcagcgatccgacgcagagtgcggcggcgccggttgctttgcaggtcggtcagcaggtctatctgagtggggctcccgggctgccggccggcacctacaccttgctgccggggcactacgcgttgttgcccggcgccttcaaggtcaccgtcgcggtgaatcagacctccgctaccgggttgtcgaatttcgcgcagcgtgacggctcttaccgcatacttggctacggcgaggtcgccaatacgggcttccacgatccgcttccctcggtctacatcgtcacgccgggctcggtcgtccgacagcagtcgcaatatgccgaaaccacggcgagccagttctatgcgtccaaggcggccgcaagcggcatcgcggctccctatctgccgatcgacgcggggcaactcgtcatcagtgcgaccaacagcctgtcgctgccggccaccggcgggttcggtgacttcacggctccggcaggcggccggggcgggcaggtcgatatcgtcgcgtccaatctcgagatcctcgcgccggggagcaccgcagcgccgggcatgaccggactgctggcgaatgcgctcgacagcattggcgcccagagcattctgatcggcggtacgcgcagcctgtacggcaacgtgctgaccatcacgccggcggcgcagcagctccagatcgacagtggagcggtgctgaccgcgcccgaaatcatgctgacggcgagcaccgcgatcacggtcggcgccggtgcgctgatcgacacgacgtcgttcggcgcgatctccaccttgttcccaaacgatccaaagaccggcaagaccctgggatcgattgcactggcgcgtgtcagcggaggcggggcaggcgcgttcgtgctggcgtccaacgctccggtgttgccggtcacgttgccggcagggagtggagcgagcaagctgagcatcggtgcgggtgcgcaagtcctcggcggcggcgaggtcgcgctgagcgcatcgaacaccatcagcatggatccgtccgcccgccttgcggcgccgaccgtcatggtcagcgtgccggtgatcaatttcggcaccggtggcgcgtcaggcttcaacctaagcgccagcctgctcgctcagttgtccgaaggtgaccctctgcgcaatctgccagcgaccggcaatttggtgctgtcggcgtccacggcgatcaacgtctatggctcagtcgatctcggtgatctggatccggtgaccggtcagccactgctcgccgcgctgacgttgagcgcgtcggcgatcaacggcttcggtgcagccaccgacagcgtcaagctccgcgccaacacgatcacgctgaacggcggcgcaaccagcgccgcggcgacaggaaccgggcagggcgcgttcgagatcgatgcgacgcaattgacgcttggcggcggtggcagccttgccttcggcggtttcaacaccgtgacgctggcggcgtcccggcaggtgatcgacggcgtctcctatgcgggcccgctcgctgcgggcgcgatgcaaaagatcggcacggtctcctatgctccaggcgaggtgatgcctggcaccttcagcgtcaacggaggtttgacgatcgcgacgccgttggtgacggcacaggcgggcgcgctgacgcagcttgtcgccaatgccggcacggtcacctttgccgcgctgcccggcggtaccggccagccggtcgccacctcgaacggcgcgacgctctcggtctcggcgcagagcattgtccagggcaccaccatcaacctgccttccggcgtgatcgctttcaccgcgcagaacggcatcacgctgcaggccggctcggtcaccaacgtcgcgggggcggtgacgccgttcttcgatgtggtgcggattgctccggccggcagcgtcacactgcagaccgcaaacggcgatgtcgcggtcgcctccggcgcggtggtcgatctgcgtggcggccggctcggctcggtgacgatgcctatgctcgatgtcgtggattccgaccagggcggcaacgccgggacactcaccgtcatcgcgccgaacggaaccgcccatctcgacggacagttgctggccagcgccgatccgcgttacatcggcggcaaggcgatcgtcacagtcaattcgggcaacgcgagcgcgctgctcggcagcatcgcgggtttctccggcgagcaggcgctgacgctgacgaacggtgacatcaacgtcggcaacatcacggcccgcgacgtcgagctgatcgcgaacggcggcaacatcaccgtcaccggcctgatcgatgcgagcggcggtagcaatgcgaccatccgcctgatcgccggcaacaatctggagctcggcgcgcatgcggtgctcaatgccggcaccaccgcggccaggggcggtacggtgacgctcggcctcgccggtaacagctcgggcatgttgacgttcgatgtcgacgccggctccggcagcacgccgacgatcaacgttgccggtgccgatccgaatatcgcgcagaacggtggacagctctggctgcgcgtgccgcggacggtcaacgccgacggcaccaccggtgtgcgcatcagcaacagcggggtccatgttgtcggcgcgcgcgagatcgatgtcgaggcggtcaaggtctacgacgttaccggctcgccctatgtcgacgccagcctggcgatggcagatagtgatgcgcgggcctatatcgccgcagcaaatatcaaggccgggatcgggtcgctgaccggcacctccgttaccgcgttccacctgatgcccggcatcgagctggacagtggcggcaacctgcgactgctgcaaaatgcgtccaggaccaactcgggaatcgatctgcatacctaccgctacaatggcgagccgatggtgctgacgctgcgcgcggccggaagcctgctgatcaatggcagcctcagcgacggctttgcggcgccggtcggttcgccggacggcaacatcttcgcgatcgcggcgccgttgccggcgggctcgggctccgccacgttccgattggtggccggcgcggatctcgcggcggcggatccgctggccgtcgtgccgactgtgctgcgccccgtcgccacgatcgccaatccggagccgggctccatcatctttgccgcctcttatctgaccgacgccaatgtcaccgtgcagattccgagcgtcgtgcgcaccggagcacgcgacctcgaccttgctgcggcgggaaacatcgacatccagaccgcgttcggcatctataccgcaggtgagcaggcgtcgccggatttcgctgtgccgtcgcgcgcgctgatcaagtcggcgttcacgtacaagtacgatacctatctcgggtatggctatgacgcgcaccgtcataaggtgtcgtacgatttgtcctatccggtccaggcgttccatccgagttatcagaccggcggcggcaatctcacggtcaaggtgcatggcagcctgatcggcgccgacaccagcagcagcaagaactatgcagcctccgcgctcgatacctactggctgtggaccgagccgttcgcggccagtccaacctggttcatcaatttcgggacttactatcaaccctatctcaagggtggatacgattcattcccgtcggtggcggcgttcaggggactcggtgcgctgggcggaggtaacgtcggtgtcgctgtcgacggcgacctcagaaatgtcgacatcagcgtgccgacgacaggcggattgaccgcagccggcgcagtggcggtgtatggtggtggcaatctctcgctggcggtgggaggcggcatcaactacgccaatctgctggtcgggcgtggcacggcggacatccaggctggcgagatcgggatggcgccactggcggccagttccctgtcgaccgcgcgggtggatctgctgatcggcgacgcccagtttaatgtggtgtctcggcgcggaatcaacgcgatcatcggcgatccgacgcgagtaacgcagcagcccgatccattgggccttaccagctatcgcatcccggccggtctggaaggcaatgggccgccctcatatcagtacaacgtgcagcggccctacggcttcttcaccagcatgacggccaacagcgcgttgagcgaactcacggaaggtggcgacatcatcgtgaatggcgatttcgtgccgccgatcttcgagctgacggcggccggcgggtcgatccgggccggcaccgttgcgcaaagcaccttcggctacaattatctcgcggcactggccgcaccgacggcccgcctcgatctgttggcccagcaggacatcgtcggttttggcgtcagcatgacggcggcagatctgtcggcccaggtcaatggcgcctcggcgccgtcaggcagtgactatgcgagtacattcaccaacccgtcgccttacgacacgttcggtggctcccagtcgctgccgtcgaacctggtgcagttcaacgatccgcataccgtccatgcctatgcggtccaggggagcttgacgaggctcgcgctagcgacgtcggagcgcgcgcaggtgcgcgccggtctcgatatcgtccagccgattatcaatatcgagaatgccggccccggtgacgcctcgctggtgcaggccgggcgcgacatcgtcagctgccagccctgcagtctggcctacccggatttcttcaacattcgcgtcgagggtcccggcgcgctgtccgtccttgcaggacgcaacattttcgctcagttgggtcagtataagacgcagggccttggcatcacgtcggtcggcaacgcggacaatccgctgctgccgccgaccggcgcctcgatcggcgtcgcagtcggcaccggcgccaacggccccgacaacgcggacttcatcagcctctatctcgatccgcgcaacatggatgcgacgacgcaaggctatctcgcgcagctcaccagctacatgagccggaacgagggcgtcaccctcggtcgcgaccaggcgttggccgatttccgcgcacttgcgccggccgcacaattgccgttcatcgagcaggtgtatttcgccgagctcaaggcgggcggcgaggcagcggcaaacgggaaaggtgccggcggcaagggttacgatcgcgcctaccgcgcgatccagaccctgtttccgggcagcgtgatcggcggtaccaccacggcctatgccggcaacctgtcgctgttccaactcgcgcgcatccgcaccgagcagggtggcagcatcaacattctggcgcccggcggcggcgtgtcgctcggcatcgagaaccagacgcccaacctgaccgggcagaccgacaccgcgcgccccggcctgctgacgctcgaaggcggcgacgtcaacatcttcaccgaccggagcgtggtggtggcgcagtcgcgcgtcttcaccgagctcggtggcgacatcctgatgttctcgaccaatggcgacctcaacgccggcaagggcaagcagacctcgatcgtgacatcgccgccgctggtcgtctacgaccagtatggccgcgccgccaagacgccgaacacgccgcaaaccggtgccggcatcgcgaccctgatcggcgttcccggtgttccccccggcaacgtcgacctgttcgcgccgcatggcacgatcgatgccggcgaagcgggcattcgcgtgtcgggcaatctcaccctcgaagcgcttcgggtgctcaacgtcgccaacatccaggtgcagggcacttcggtcggtgtgccggtggtgcaggggccgccggtgggcgcgttgactgcggcgaacaacaccgcgggtgcggcccaacagccaacggcggcggcaccggccgccagcactggccagccctcggtcatcattgtcgaggtgctcggctatggcggcggcgacggcacgtcggatccgggcgacgatgacgagcgtcgccgccgcaacaaagagcggcagagctacgatccggacagcatgtttcgcgtggtcgggagcggcgacctgacggcggagcaggcgcgccagctgacggatgaggaaaggcagcgcctgacgtcacgatagtcgcactggattctttggtgggcccggcaggactcgaacctgcaaccagaccgttatgagcggccggaaaagggatgcggccgttgatttttcggcattttttgtgatgtttggccgcgtttatcgctcttggagggatcgtttctggtgcgaaactggtgcggctggcttagcctgcgatcccgaccgctgaacggcttggctcgtgggttcgacttccactctctccgccatttctacgccacagctctccccagtatccgattgttcgaatctaccgcgaactcaccgaagaactccgcaatgttgcgctaattcctcgcgaaagccgtagttttttcgccgcgggttcggaggagggtgcttccgctactacgctccctcctctctaacccattgttcgaattgagcagcaaaaacaaggagtgcgcgataaaggccgttgcggctaatttgcgatggtacccctagtcgccgcccaaaccgtaggttttggctgtgtgttcggaggatggattttttgcgactgggaccagcggtcacactgctctcgctgcgtgtgaccatcgacgcgcggcgtcggcatgttgccgatccggaggaggttcgagctgctcaccctatccccttcccacccccagctttgtaggaggctcttaaattgtcagggcataggcggctacgatacctcaacctcggcggccccttccgatcaagggagctaggatcttcaggctgcgatggaccttgatgcttactttcgcttcgatccgcaggcaatcgtgattcgccgccggacgttcgccattgtcgattgaggtttcgatcgcctgcgcgcctctgctgcgaaggaagctaatcaacctgtagcgagcaatcgcttgcagccatggcgtgaacagcgctctgcaatcgtaggtctgacgcttctgatgaatcgccagcaacgtctcttggacaagatcctccacttggtccgtgctgtgtccaagtctgatcagctcgcgctcgtagtagctgcgcagccgtggtgcgaggttcgcaagaagcgcatggtaggcgatcgcgtcaccacaccggcttgccagcatctgcgccttcagttcgggttcgtcagccgtcattcacaatcaagcgagtcgctgttggctttcgccggtcgcatacctcgaaccaatccggcaggtggaattgcgcggcgtgccgcgctgcgcaagttcacgatcatgatcgatcgagcgagcgggagggacatcgaggtcattgttcttctgccggagttcaagttgcccggcacaacagagccgtgaccggattgcgcttggttaccgcattagatgatgccgccacaatttaacttttccacgaatgctcgatagtttctaaaatgcacgtcgtcgctaggcaggtcgccgtttgaaggcgtgccccgagatcggcgaatacgccaatggtcacgggtgcagtgcgacttactctcccgcggtgacttcatcgttccccgcacgaaggccgcccaacatggcgcggccgaccagttcgccccgaggacttggatgtgttcttgaccaagctgctcgacggggcgaagcaggtcgcatcggactacgccggctggatcaacatgcccgatggcgccaagcgcgctgcggctcgatcgaggtcctcaactagtcctcggcggtaagctcaagcgtaaatggtagctcgccttcgagcgcggttgaacgcaggggcggcgccatcccccatccggcccgcggctgacgcggtgcccccgttttgaccacgcctgcggccttgacctccatcattatgcttagcgcggtcgacgtcttcatcttctcgttcggtacgttttacatctatcgcctcttgcgcgccggacccgcgaggcgtgctgtgcaaccacgtcacggtgtcttccccaaacgcccgatgtccctggtcgcacgtgagttcaccgaaccgcagccacactagcgaggaatgttgagatggttttattttggtcgcgctcctagcggacagcatcgttcgggaagccgtaaagtgtttcaacaaatgcaacatacgtttcaacgacggagaggcgcccggacgaggatcgcgaaacgaacttgggaaaccgcacgaccccttcaaacctgatgcgccgccgaattggttaaatgttcctctgggaaattccgctcaggatcttcgggccgccgtccttgagttcgtcgagcgccatcaacatgacaagctcttccctcatgtgcggcgtggaaaccggggcctcgccgcggtcaggtcagaattccagtggcatgactgtgcacaatgccctgcgatcagaccgtcatgagcggcgggatagcggctggcttcatctctttgtttgaatttgatcgcgttcgttgcgcctcgacccggtcgtttctagtgcgaaactggtgcagtgacgcctgctcatgaagatgagccggagcgacctccgcaaggtaacgttcaccgaacctacgaacgttgcggtcgagggtattcccagatcggagttccagttgcgcaaaagcacgctcgctatcgtgcgtctcttgcgaggatgcctcatcgtgcggatgggcaatgtcggccgacttcttgaaagatgcctgcgccggcggcgcctaggctgatctcctgagcgacttacgaccgcacccggctcgtcgacaaggatcagatcatgacaaatgctttgaatgtgaagccggcgcttggagctgcaatccacgcgatcgcgccaaggtggggctggttcgttgcccttggcgtcggtgagttgatccttggcggcgtcgcatcgacaaatctgctggcggcgagtctggcgtcggtgctggtgatcggcgcagccatcgcagtcgccgggctgatccagatctttcacgctttctcggcgcgcggaccgggcggcgttctgctctggctgcttgccggagtcgtctatgcaactgccggcgcaatcatcctctacgacccgatcttcgcgtcgttgacgtcgtctctgactgcgggcgtttttattactatctccggtatcatgagggtttgggccggtttccatgcgcggcccgcggcgggctgggctggctcgtcgccgccggagcgctcaccgtctgcgtcggcgccgtggtcgttgcggcatggccggccattggcctcttgctccttggcgtgatgctggtggtagacctgatcttccagggctggggcctgatcctgtttggcctggcactgagggcgcgtgcgtcccgccgttcaaaccagcctgcaacggtgtgagccatgataacgggttcgacatgcacgccgcatgacgagatcgcctggcgcgggaaccatagcctgcacacgtcgcggctcgttgccgaagagacggccattgcgctgagctacgatggatcaacgcatgccgtgatgatggcgacgccgtctgatctagaggagttcggcatcggattcaccctcaccgagggcatcgtcgagcacgtgagcgaaatcgaaaccatcgaggtgcgggctccgcttcagagtctcaatcagcagacgcgatccctgcacgcggcggcgttctggcatgcggcggccggattcgcattggtcagagaggatgtcggccggcacaatgcgctcgacaaactcgccggggcggtttccgccgatgggcactcggcaccaggcggagctgtgctgctgaccagccgtgtctccgtcgagaaggtgcagaagacggcggtgatcggcgtaccgttcgtgattgccatgtcgcccccgacgacgctggctatcgggacggcggaaggggcggggataacgctgctcgcgatgatggatacggcatattcacgcacccgcatcgcgtcgttctggccagacgatcgccgcggcaagccgcttgtcgatcgatgattgcatgagatagccatggaagctctctctccgcactcggctgcaaggaagcaggttgcagcctgcgtgccggaacagtcgctgctggtcgcgtgtctgctgagtatgtcaggcggcttcatcgacgccttcacgtggctctcgctcggtggcgtctttgcgaattcgcagaccggaaatgtcgtcttcctcggagtgtatgctgcgagcggacagtggttccaggcgcttcatcacgttcctccgatccttgcctttgtcgcgggcgcatgggtggcgacaacggtccgagcgccgctgctgtgtctcgcgggcgagatcgtatctctgaccgtggtcatgctgttgctgcaccggcttgccgagccggttgcagtgatcggagtcgccttcggggttgcgctgcagacagctagcttcaggctggtcgaacgctggaaatacctctcggtcacggtgaccggaaacacgctccgggccatcgatctcctagtaacggatccccgtcgcgaggctgtgcgcggcgcgaaagtcatactcacgatctgcctgatgttcctgctgggcgccgcggccggagcattggcaacgaagcggctgggcgccggcggcctgattgttccgatcgcattattgactttcgctctcgcactatgtggtcgccgccaccgctggcaggcctgatgtctttcgagaccatgcttgttggcaagctggcattcgtttgcggtagatggttgcggtctgtccaaatagccgtgggcttacgctgcgatcttggtaccggcgcagctcttgtttgggcaaccgggatcttcggttgcaactgtactcggatcagacgattgtgatgggatggcggcgcggcctcagaggcgccaggtcgcaagccgccaaaagagaggcgctggattcggggcctttcttgtcgttcaggtctttggcatcacgccgggactggtgtcaggccattgagcaatcagcttcgcacccagattgagatgctgggcgaccaactccggcggagtgtgcgtcagccagttggacagtgaaacctcttcgtagcgcggcgcacggaatacgccgacgaactccaggtcggtatcgccgacgttctcgacatagtgcccgagattgcgcggaacatagccgatgtcgcctgcggaaaaatccgtcgtcatggcattcgggcccgtgttgaataccgtcatccgccccttccctttaatgtagtattgccactcatcagcgtttgggtgccagtgcatctcgcggataccgccgggccgcaccgttacgagcgctgccgcgaccgtcgtggcaaccttgaagttgctgctgtcggccacgcggatagttccaccggcgttttccttgaccggagccgaactgctaagcgggaagataaatggatagggcggcgcctcggcatgttttgcgatcgcttcgcgatcagcggcgagggcgccgggcaccttgccttggaagatccagagattgtgcagcggaatgttcgcgaaggtatcggccgagacgccgaagttctttgccagaacttccggcggcgtatgtatgaaccaatccgtgacaagcagcgtattgaattcgttggcatggccgtcgtcgaagcagatcacgaactcgcagccgtcgggcccgagtccctgcagcgaatgcggcgcgcccgccgggaaataccagaggtcgccggccttgacgtcgccgacataaggccgaccctcagcatcgagaacagtgacgcggcaattgccatacgtcatgatcgcccattcggcggcctggtgccaatgcagctcgcgaatgccgcccgcggaaagccgcatattgacgccggatatttctttcgagatcgcaaaatcattgacagtgacctgacgagcccagccgccgttctgtatgcgccttggtgcattattgaacgaagcccaatccatcggcagaccacctacgtcagttgctggcggcgattgcatggaaggaaattgcttcgcgagctccgggctttgcggtccgggatcggacagacttcctgggcttttggcgttaatggctccctgagccggctcgtccgggttgccaaccgtggctgcttgcgccccggcgctgaccgcggccgcgcccgccgccgaaagagccagcaaatcccgtcgtgagaacatgttggttgctcctgaaatgtggttgaaacgagccgcactcatcgcggcaggctccttgagcgagcctataggcgccgtgcattgcaggcttccgcgaagggcgtctcttttttcggaacgcactgtcgaggcgtgttggcccgatcggactccgtcgatggtggtcgccgtgcttgtgcgatcgcgaaaagcgaagtccgatttgaaaagacggtgctcgcgcgatgatcctaactgacagcaggatcgtggcaccaaaagagatctcaaatgaccagcaaatcggttcgtccctatcgcgagcctgccggcggatggggggcgctcaaggcgctcagcgacgctctgctggtacaacgggtcccggtgaaaggtgcagcgacactgagacgcatgaaccagccgcagggctttgattgccccggctgtgcctggcccgatcccaagcacacctcgtcattcgagttctgtgaaaacggcggcaaggcggtcgcctgggaggtgacagccaagcgctgcacgccagagttcttcgcagagcataccgtcacggaactcgcgggctggagcgactacgacctcgagatggtcggacggctcactcatccgatggcctatgacgccgcctccgatcgctaccttccggtgggctgggacgaagccttccaaaccatcggcagccacttgagggcgctgcccgatccgaacatggcggatttctacacgtccgggcggacctcgaacgaagcggccttcctctatcaggtcttcgtccgcgaatacggcaccaacaatttccccgactgttcgaacatgtgccacgaggcgaccagcgtcggcctgccgaaatcgatcggcgtcggcaaggggaccgtgctgctggaggacttcgacaaggcggactgcatcttcatcttcggccagaacccaggcaccaacagcccgcgaatgatgacgagcctgcgcaacgcggctcgccgcggcgcttcgatcatctcgttcaatcccttccgcgagcgagccctggagcgtttccaggcgccgcagagccccgtcgagatgatcacgctgtcgtcgacgacgatcagctcaaagctattccaggtgcgggtcggcggcgacgtcgccgcactcaaggggatcatgaagatcctggtcgaggcggatgaggcggcacgcgccgcggagcagcccgagatcctggattgggatttcatccgcggacacaccgtgggcatcgaggcgctcgccgatgacctcaagcgcacgcaatggcccgacatcgagcgccggtccgggttgacgcgcgaggatctggaatatgcggccaaggcctacatgaaatcggagcgcgcgatcttcgtctacgggatggggatcacgcaacactttcgcggcgccaacaacgtccagcagatggcgaatctggcgctgctgcgcggaagcatcgggcgcgaaggagcgggtttgtgcccggttcgcggccattccaacgtccagggcgaccggacggtcggcattaccgaggtgcccagcgcggaactgctcgcgcgtctggagcagcggttcggcttcaagccaccggcagcgccagggcacaacgtcgtaacggctctcgaagcgatgatccgcggcgaggccaaggtcttcttcgcgatgggaggaaactttgccgccgccattcccgattggcagtcgacgcgggcggcgctgtccaatctcgatctgaccgttcacgtctcgaccaagctcaaccgcagccatttggtccacggtcgcaatgccctgatcctgccgtgcctcggacgcaccgaaatcgacattcaggcgggcgggccgcagtcgatcaccgtggaagactccatgtccatggtgcacgcctccggcggacgcaacaagcctgcgtcggaacatctgcgcagcgaggtggcgatcatcgccggcatggcgaaggcgacgctcggcgatcgcacggtggtcgattgggacggctttgccgccgactatgacctgatccgcgaggcgatcgaagccgtctttccgatttttcagggctacaacgcccgtatccggattcccggcggctttcatctcaactcgacggcgcgcgagcgcatctgggcgacgccgtccggaaaggcgaacttcctggtcttcgaaggctgcggcgaggatcccccacagagcgacccggagttcctgtggctcagcacgatccgaagccatgaccagtacaatacgacgctctactcgatgtccgaccgctatcgcggcgtgttcggccagcgtgacgtggtgttcctcaacgaatacgagatgaaacggcggggatttgccgaaggcgaccgtgtggatttgatcacggaatcgaccgacggggtcgagcgggtcgtgcgcaacttccgcgtggtcggctattccttcccgaccggctgttgcgccgcgtactacccggagaccaactcgctggtcccgctctatgcccgcgatcccttgagcttcacgccgtcctacaagggcatcccgatccggctcgtgcgatccagcggtaccgatgaagccgccgtgctgctcgatcactgaagaagcccgcctgaggcgaagtcggggaccgtgcgccgtcgctatcgaggatcgcagcttcggacccagcttccggcggagcagccggaggcaacgatcgggtatggtcgcgagatttccggcccgcacagcaaaacatcgaaaacaaccccatgcaaagcagctgatggacgcctgcgcgatgtccggcgaatcgacacgccgggcaaatcaccggcacgattccaccatcgcagccgctacgatccgtagggcttcgtcaaccccagcgaagcagaggcgcggttcagaccatctcgaaccttaagcgcatgatcatttaggtgaccgccgcctcgggcttcgtcacgccgaaccgcctctcgaattcggcgacgttgacgatgccccgccgatgggtgccgtcgccgatcttgcggtcgccgtcccaggcctcgacctcgaacaggatactctttgcctcgactccgacggcccttgcaatggctcggacggtgcggccgatcggtgttgccgcgagatggcggatgttgaccatcatgccgacgctgacataaccgaccggcaggaacggctggatggccgaccccgaggccatctccatgtgcaggatcatcatcggcgtgccgtacaccgcgggcatgcccggcacgacgtggccgactgtcatctcgggcgtgacgaccacgaccttttctgcggtcatgccggtcgtcaccttgtcgaatggattcatgatgcaatcctcgtttcttccgcgacggggggcggggatgtttcggaggcgccctgcggccgccgggtgagccacgcgccgagcttgtcgaggtagagatagaccaccggcgtggtgtagagggtcaggatctgcgacagcatcaagccgcccacgatggtgtagccgagcggttggcgcagctccgagcccgtgccggtgccgaccatcaacggcacgccgccgagcagcgcggccatcgtcgtcatgaggatcggccggaagcggagcgtgcaggcctgatagatcgcctcctgcgggctcaggccatgctcgcgctgcacctcgagggcaaagtcgacgagcatgatgccgttcttcttgacgatgccgatcagcaggatgatgccgatgatggcgatcacgctgaggtccatgtgcacagcgagcagcaggagcaacgcgccgatgccggcggaaggcaaggtcgacaggatcgtgatcgggtggatcaggctctcgtagagcacgccgaggatgatgtagatcacgatcagcgccacgccgatcagcagcggggtacctgatagcgaggactggaaggcctgggcgttgccctggaacgacgtggccagcgaagcgggctttccggtgtcccgctcgatcttctggatcgccgagaccgcgtcgcccagtgcgacacccggcttcaggttgaacgagaccgtgacggatgggaacatgctctggtgattgatgagaatcggggccggcttgatgacggcatgcacgagcgtgctgaggggcacctgctggttgctcgcggaattgacatagatgcccttgagcgcgtcgggcccgtactggaagctgggattgacctccatcacgacgtgatactggttcaacgaggtgaacatcgtggagacgattcgctggccgaaggcgtcgtccagggtgttgtcgatcgtcgagggcaggatgccgtagcttgatgcaacctcgcggttgactgtcacgtcgagcatcggaccggcattctcctggtcgctggcgacgtcggtgatgacatcgagcgcacgcagcttgtccaggaagatcgccgaccagtgcgacagctcattggaatccgcgtcggtgagcgtgtactgatactgggtcttcgacaggcgcgcgccgatggtgatgtcctgggccgcctgcatgtacaggttgatgccctggatgtgggcgagctcccgcgtcagccggttgatgatttgatccgcgctcgccttgcgtcccggcttgggcttcagaacgatgaagatgcgcccctgattgagcgtcgcggtcggaccgccgggcccgatatagcttgctaccgattcgatgtcgggatccttctgcaggatgcccacgagcgcctgctgacgctcggacatcgcggggaaggagatgtcctgcgcggcctcggtaatgccgacgatctgtccggtatcctgctgcgggaaaaagcccttcgggatgacgacgtagaggtagccggtcagcgcgatggtggagagcatcaccagcaacgtcgcgaagcggtggcgcagcacgacgtgcaggccgcgcgcgtagagcgcgagcagggaatcgaagcccctctcgaacaacaggtagagcctgccgtgctttctgcgcgattcatccttgagcaggcgcgcgcacatcatcggcgtcagggtcagcgatatgatcaacgacagcagtagcgctgcggtgatcgtgatcgcaaattcctggaacagctttccgacgtagccgcccatcaggaagagcgggatgaacacggcaatcagcgaaagcgtgattgaaatgatcgtaaatccgatctcgctggagcccttgagcgccgcctgcatgggcgtgagccccgcttcgagatgccgcacgatgttctcgatcacgaccacggcgtcgtcgaccacgaagccgacggctatcgacagcgccatcagcgacaggttgtcgaggctgtagccgagcacgtaaagcacagcgaacgtgccgatcaacgagagcggcacggtcaccgccggaatgatcgtggcccagaaatttcgcaggaacaggaagatgaccatcaccaccagcgcaacggtcaacatcagggtgaactggacgtccgagacggcggcgcgaatggtcgcggtccggtctgcggcaatcgtgaccttgattgcggggggcaccgacgcctgcagtgttggcagcaacgtcctgatgcgatcgacggtttcgatgacattggcgcccggaacccgctggaccgcgagaatgatggcgggctgcttgccgtaccagccggccagcagattgttttcgggcccctcgatcgccgtgccgatatcgcggatccgcaccggcgagccgttgcgataggcgatgatgaggtcgtcatacgccgccggcttcaacaactggtcgttggtgttcagcgtgtaggtcacgcgcgggctgttgagcgtgcccttgggcagatcgacgttggctccggcgatcacactacggacatcctcgaggccaatgccacgatcggcaagggcctgcgggttgacctggacacgaatggccggcttctgctgcccgccgattccaaccaggcccacgccaggcacctgcgagatcttcggcagcaggatattctcggcgtaggcatcgacggtcgtcatcggaagcgtatccgacgatagcgcgatcaacatgatcggcgtctcggccggattcaccttccggatggtcggcggatagggaatattcggcggcaaataggggctggcggcattgatcgccgacaggacgtcgacggccgcgctgtcgacagtacgtgagagctcgaactgcacggtcagctgagccacaccgagcgcgctcgatgaggtcagttgcgtgacgcccgggatttggctcagttgctgttccaggggcgtggcaacagacgatgcgatggtctgcggatcggcgccgggcaactgcgccgagatctgaatggtcgggaagttgacgttgggcaacgccccgaccggaagcaggggataggccgcaaggccgcacagcagcaggccggccatcagcagggcggttgcgatcggccgtaagatgaagggcgcggagaaattcatggcagcgcgtcctgcacagagctttgcaggtccgcttcgcgcgcggccttgccgtgcagctcctgaacctggctgccttccttgagccggtactgtccgtcgatcacgacgacatcgcccgatttcaggccctgatcgatcagcgcctgcccgtcgctgatctgcgcgacgtggactgggcggagctccgccgtctggttcggcttcaccacgtagacataggcgccgttcgggccctgctgcacggctgagccggcgacggtcaaggcgtccttgcgggtgtcgagcagcaggcgggcatttatcagttgtcccggccatagccggtgatcgcgatttggaaaagtagccttgagctgaagtgtgcccgtcgtctggatgatctcgttgttgatgagaagcagctcaccctcgtcgagcttgatcttgtcgtcctggctgtaggcgacgaccttcagcggtcccttggtcaactgctgctgaatctccgggagatccgcctccggaagggtgaagagcagcgagatcggctccacctgggtcactacgacaaggccgttcggatcggtcgggtgaatgacgttgccgacgtcgatctgcctgacgccggtaacgccggggattggcgacgtcaggcgcgtgtagctgagctgaactttggcttcgtcgatctgcgcctgatccgacttgacggcggcctgtagctgcgcgacctgcgccttctgcgtctcgatcaattgcggagtggcatatcccttgtcgccgagctgggtgtagcgggaaagatttgcctccgcgttcgtcagctgggcccggtcgcggtcgcgattggctgtgaactgctcgatctgggcctcgtatggacggggatctatctgtgcaagcagatcgccggccttgaccgtctggccctcggtgaaggcgatctggacgatttgtccctggatctgactgcgcacgacgtcagtgttgtaggcgatcaccgtgcctatgccgcgcaggtaaatcgggacattcctgccagtgaccgtggcagcgaccactgggattgcggcagacgccggcaggctcgctgcggccggccgggctctcttgccgaagtaccagacgctcccgccgccaagggcagtggcgagcacgaccagcacgacaatgaagctgcgtttcacggtggtgttcctctcatgaatctcagggatggccgaaaccggtgatcgaaaccgcattggctggtgtgcttgggcccgcaacgggcgcgacttggctgattccggcattgccgatctcggtcgctcccaagggaaccccggcacgtccggccgtcgacgacgagggcaggggagacgaaggaatgctgctgtcggtgcacgacagcggcgcgcttccggaaatcccgccaccgtcgaatggagctttcgatgacggagcagcactcgagccggcgcaattcccgatgcctgtacctggcgaggggatgatcggacttacgccgggcgttgcgatttcggtcgcgccgagcggaatgcctggcgcgccgctcggctccatcatgaatggcgatgttgctcgcgcgcctgacgacggcggagttgaagatgtcgtctgggcatttgctgcaacgggcctcccgatcgcgccggttgcgagccacatgcacaggacgaaagcgcccctgtgccatttgagccgtcttcgcatgtgtggtgctccgaaccaggttgcacgccaatgataaagagcagagtgagcgctgcatgatgcgcatgagccggaggccttccttgcggattgacggggtcaccgtcgttgccggcgcatgatccgcttcacgttcgcgcctatgatggaaatctcatcacagccagcgtgtgcaggcataccgaagtgggctagcggcgccggggtcaccgctgcaatagcgacgtatcttgcttctcagtgtgctgggcttcaccgtatctctcacgcactcggagtctgaagtcggcatcgccgtcatgcattgagtgagtgtctgaaagcgacatgttcgtttgccctggtccaacaagcagaagcgattggtgtaaacttccggaggtttcagtgtggcttccgaaatgccgataactgcgacaatcgctgttcccacaaccacgtatggcaaccctcgtttgtagctcaacgcgacggctcccttagcactcgctgcgatgcagaagcagctgcttcaccggaacggtatagcaatttgccatatcccgtattgccgagacgcacgccaattcccaagccgaacgctcaaatgcgcaaggacccgtgtggccgctctgaagttagcatgcagtatcacaaacaccctggtcttcgtctacgttgcgcgttgtgttttgatctggaagtagcgacggcgcctcaatgccaggccttgagccttgcttgcgacaacaaccgcgttcgaagtctttcgacgaggctcggattcctgcgcatctgcgtcaataaatccacccggtggtgtcgatggcccgacgctcggactctggatataactagatgaagccactcgcccgctcggcctacctaacgctatgagcacaccgattgcggtgcttctcgtgctagccaggatcgcactggcgagaaggtcgaggtatccggtcgtacgaaaaaagatgcttcagccgactccttctgggagccggctgaacacttcgcgtgaagtcttcgcattcgtcagccggtttcccgtaatgctgtgacgaaaacgggctttggaaaatacgcgccgcgccgggaacggcttgttcaagcgccttctaactacgaagcacagcggaaactctgaggtcttcgtagaggcagttccttaggtcgccatcgctaggggcatgggtgcctccttccgtcgtaaccgatatacgtcccggtattcggatcgtacgagcgatacctctgtgcgcaaaagttggaagcagtggcaacatcgtaatcatcgtggagccaatcgtcgtagccgtcaccatagtagggccagccaaggtatgcgcctgataccaaagcgccgccaagtcctaagccgcgcgcgtacgcccatcggtgggtgcgattgtgatggaatctgccagcaccgagccgattcgcatcgacgtgatttagacgaccaaggcccatcgcagatctgtgaagagtgccagcggcacgaattcctgctgaagaggctcgaaagcgtccggtgccgccgaaatgcgcgccaccaccatgaaagcctccgccgccaccatggccaccgccgcgagagtaagctggcgccgccgttgtcaagattacgacaaagatagccccgcaaatcgtcatgatccgatccatcgttatttcctttcattcatgagagtcttacacgcttgctggatccgtcgcccgctaagcgatcgtgcaacgtcgccgcgggacgccgctgctcagattttgttttcaatccttcttcatcgcgatcttggtgtcagtcctgacccgtgcccaatcagccttcagcttctgcatgaacgaactccggagcgtgttgtggcattcgctgatgatcatcggcgccacgtctcggtgccttcgcgcttctccacgcctgaccaggatactgccgcctgcaacgacgtttcgactacgggcgcagcgcggcgcgcgcattggtgagcgcccgatggcagccagcggagtccccggcgtcgctggcggcgcgagcctgagccaatgcatcgagcgcctgttcgaagccccgccgatggctgccttcggtggccgccagcgatcgcggcgtcggctgataaccgcgcagtgcgtcgaggctttccgacttccatccatcggttcctgcttgtctttcgatggcggcgtcgatctgtgcctgaacgcgcgcgattgaaggagcgcacggactggcttgggcggaggtagcggccaatagcgcggtgatggtggcgtagcagttcgtgctcctggtcatcttgctcatcctcgaaagggcggtcgcggtcagtgttgtctacttgcaagaggaatagttgctggtctttcgcaaaagaacggaaagagcggttggacatgtttgcgtcgacagaatcccgtccgaagatcgcgtgcgttcttcgttcgcaaacgatgagactcaatttgcaggctgtgccgacggtgggcgacagcaggcgtatcggcctagcgaagtggtcggcgacagactcggcttcgtcttcaggtgccgtgttttcgcgacaatatcgttcgttcgggggagacggaggttggccgcgttggtaggtcggatatctcgatgtgtactttaaccgacaaagtgacggagaaccgacgatgcaacagttcgcgcgtgtactaacagacaaaggcgccgttccggtaattctgaaaggtagtgagcacctcgacctgcggcccattgtttccgacatcaacccggacgcgatagctggaggtgctttaatcaatgtcgatacctctcgcctctctccgatcgccggtgacgtcacatacctggcgccaatcgatggcattcggcagatcgcggcgacgggcttcaactacaagaagcacatcgaagaattcaagatgaaccgccgacggaacctgaggtgttcttgaaggcgatcagctcactgacgggacccttcgatccgatctctcgtggtcctaatcagaacgtgaaacttgactgggaagtcgagttggcaatcgtgatcgggcgggaagcgaaagatgtcagcgctgccgccgcagccgactacatcttcggttacgtctgtgtgaacgacgtttcggatcgcgcaacgcaggtcgatgaagaaggtcagcaacacttggtgcgcgccaagtcgcgaccgggatattccccgatcggaccctatttaacgactggtgtcgatggaatgcagctcgatatctggaccaagttgaacggaaactacgagcaacgtggcaatacaagcgacatgctgttcggtgtccccgagatgcttgcctacttctcatcgcacatgacgttgcttcccggcgacattttggcaacgggcacgccgcctggcgttggtttcggtaaaaatcgcttcatgaaggtaggcgatgtgctggaatgcggtattgccaatctcggctcgcaacgtcacgagatcacatcttgatgcggtagatgggagtcggccgcgcgcgccgttacgttgcccttagtgccgcagaggacgggaggttttgtggccatcatcaacatcaacatcaacggcgcgacgcatgacgtggacgtgccggctgatatgcccttgctgtgggttattcgcgatgttctcggtcttaccggtacgaaattcggttgcgggattgcccaatgcggagcatgcaccgtgcatgtcggcgggcttgcgcttagatcatgtgtgctgtcaatcggtgacgtcggcgcgcgcccagtgacgacgatcgaggcgattggcgccactaccgaaggctcaaaggtgcaggcagcctggctcgagcacgaagtcattcagtgtggatactgtcaatcaggtcagatcatgactgctgcggcacttttgaagcatgtgccaaatccgaccgacgctgacatcgacgcggcaatgtcggggaacatatgccgctgcggcacctacgtgcgtatccgacgagcgatccatgccgccgcggtcaatacctgataggcttgtcatgataagtgaaatttctcgtcggtcggtgttacgagctggagtagccatcggcggggggcttctcctcgaaatgcgccttcccgagttcgcgtatggatctgaacgtttagtggatggcggcgaattttctccgaatgcgttcattcgcattgatggaagaggagccatcagcttcattatgcgcagtgtcgagatgggccaaggtatctacacggcggccgccatgctgatcgcagaggaactcgaggtgcgtcttgatcagatcgaagcgctggcggctccggctaatgaggcgctatacaccgacccgatcctgggccagcaggaaaccggcgggtctgcatcaacgaggagtagttggattccacttcgccaggcgggtgcaaccgctcgagttatgctgatcatggcggccgcaaagcggtggggggttgtcttcgaggattgcgtagcgcgacaagggatggtcacccattccgcaagcggacgcagcgcctcgtatggggaactcgcggaagatgcggcgcgacagcccgttccggacaatgtgccgctcaagccagcatcagagtttaggctgataggctcatcggctcaccgactggatagtgcggcaaaggctaacgggacggcgactttcggaattgatatcaaggtccctggaatgaagatcgggacagttgctgcctgtcctgtcaggggtggtcgccttgtttctatcgacgaagccgcggccaagcgcgtatccggtgtccgcgacgtcgttcgccttgatgatttggtgtcggtaatcggcgacaacatgtgggctgcaacgcaaggcctggccgccgcaaatccccattgggatgagggaccgaacaagagtgtatcaacggaagatctgatcaaggacttggacactgcgtcccggcagccgggcgtcgtggcaaaacaagagggagaccctgtctccgccattgcgggtagcgtcacacggatcgatgctgtgtaccaacttccctttctggcccacgctccaatggagccgatcaatacgacgatacacattcgagccgatggtgcggatgtgtgggtgggcacacaggtcccggttcgcgcgcaacttgccgtcgcgctcgttaccggtttgccccaagagtcgatcaacattcataatcagtatttaggtggagggttcggtcgtcgtctcgacgtagactcgatccatcaggcagcacgaattgcaaagcaactcccgtatccggtaaaattgatttggactcgcgaagaggacatccagcacgacctgtatcgaccctattactacgatagggtctctgcggggctcgacgcacaaggcaatatctccggatggacccatcgtgtgaccggatcgtccgtcgcggcccgatggcgtccatccagaatgcagaaggacggccatcttgatccagacgccgtcttaggggccaccgaaaccccgtacgaactaccagcaactctggtcgactacgttcgttgcgaacctcgcgtattcgacacgctatggtggcgcggcgttggtcagacgcacaacgtattcgtcgtggaaagcttgatggacgagcttgctgcggctgcatcccaggatccggtcgactttcggcgcaagtttctaaaaaagaattctcgcggccgctcggtgcttgatctcgctgttgagaagtccggatgggggaagccgcttcccaagggctggggcaggggggttgcgctgcaattctccttcaatactcatgttgcctcggtgcttgaggcggagatctccggaggtgaaatacggctaagacgtgtgcacattgccgtagattgtggcccagtcgtcaacccgaatatcattgaagcacaaatggaaggagggatgatcttcggcctgaccatggcactttacggcgagattacggttacgaatggtcgggtcgatcagagcaacttcaatgactatcgcatgcttcgcatgaaccaagcgcctgaaatatcggtccatctagtgaacaatcctgatgctccaatcggtgggatcggggagacgggtaccgtggcggcggcaccggcactggcgaatgcgatctattctgcgactggtcggcgtctgcgccgtattccgttcgcacagcaggtggcccagacacaatgaacatcagattctgggacagctttggcaggaaaggtcgggccttgcgcgtcatgggggcattcgcaattgccatcattgcggcgctatgtgccggtctgacgtggcgtctgctcgatcgtgatcctgaagtcgttgcagccgacgtcgagtcgtcacctgccttgattgcgaagggagagtacctcgcgcgagcagcggactgcgtcgcctgccatagtgcacctggtcgcgcgccattctctggcggggtcgcgtttcgccttccgtttgggacaatctattcgactaatattactccggatcgagagactgggatcgggtcgtggagcgacaatgattttgtacgtgcgctccaccgcggaattgcaaaggatggaacctatctttacgcagcatttccatacacgtcgtacaccgcgatgaggcgtgaagatgctgtcgcaatcaaggcatatttgttcagccttccggcggttcacgcgccaccacgagccaacagtctatcgtttccctttaaccaacgttggtcaatggcgatatggaatctcctattcctcaaagacagacgattccgaccggacccgagcttgaacgatagagaaaatcgtggagcgtatttggcatcggcactcggtcattgtggcgaatgtcacaccccgaggaacatggcgttcgcccttgacaactctaagaaattcgcaggggccatcgtcgaaggatggcgtgcttacaacattagctcggatcaacgcttcggcgtcggcggctggagcgataatgctctcgccgaatacctaagcagtgggcacgcggcgaacaggggatccgcgggcgggcctatgggagaggcggtggccgacagcctgcagtatctggcatctggggatgttgacgcactggtggcatacttaaagcggatctcaccgcaattagggcagcgagggtccgagatcagcctctcctcgccagcgatggcggtatcaagcccctggggaccgggcattgaagaagatgcagacgggttgggacgacgaatattcgagggcgcatgtgcaagttgccatcagtggaacggcaatggacagcaaacatcgtacgccgcgctcgcaggtagccagactgttaacgaccctacaggtactaacttgatacagatactgctcacgggtgcagacctagcttcgggtaaagtcagggcatatatgccgccgtttggcaaagcatattccgcggaagagctcgccgcggtatcaaactacgtcattgctcactttggcggaaagcctggtcttgttactgccgaaatggttcgccagcggaaagccaattgatgccgacgtatagtgccgccaagctgcgctgtacgaagcgtgtgagcgtcgggcagatcgtataggtggcacgcgacggttcggtcatcttcatccgcctgtagcgacggctcctcctgctggcagcaatcgaacgcgaaagggcaacgagtgctgaaccggaagccactcggaggactcatcggactgggcacatcgccgcccaagcgatgcgcttccgtgctgcatcaggttcgggcaccggcacggccgacagcagtgccagagtgtagggatggcgaggctttgaaaatatctgccgcctagttgcgacttcaagacttcaacaaattttcctagatacatcaccgcgacgcgatgcgtcatatgttccacaatagctgcaaaggattcgtcctctggcggtccggaatacataggggacgcattgagaggcagcgagcagagtcctgaggactcctcaacttgacaggtaggcttcgcgggttagaggaacggaactaaataatgcgtagcctggagagagtcccacattcgcttacgaaggtcgctgccgacacggcaaatgccgatcaagcggttggccaaaaaatgggccgcccgctgggggggagcggacggcccagtcggctcgacggtgggaggaagcgcgttcgagcctggcaaagggctgggggtagccctcatcgtcttgtctatattggatcgcatggagagtatttcacatccgactggaactattgaactcgcatgattggccttctatcagcagtcaggtggatctcgactcacgcataatatggcctcagcacccagcttcattggctacatcaaacttttgatcgtcacgcttgtgacctttcgtccgtagtgccgctcaattctagagttgagcgcgcctagctgcgtggttggcggggctactaggtagctccgaatttggggtgcggaaatcgcgagcgatatttttcggcctcatactacagcatatcccgcgcaggagctgagctagtgatcgcagtcagtttagcattgtggcgcggtcttgcgctgaggctttcgtcaggcgaatggcattgtcgctagggacccgatacttggccgcacccactaagccgtcgcgggttgccccgctttggtagcgatcgccaaaggtgtggacgtgcaatcgcggaattgcgtctcgcccttggaaagaccgagaaatgacgccttgctatagaaacccacccttggatgcgcaccaaggggtcgagcggcagttggccgcacgatcgttgaccgatttagaacgtgaagaggtgattagatggggtttggtgagcaaaccggctcggcgagagttgcgcgtcctgagaacggatccgtatcggaccatctgctactgcgcgagttcagtcaccgaataaacaatgagttgtcgtcagccatcagtcttatttcgctcgcggcaaagcgtagtcaaaacagtgaggtgcaagcgacgcttgctgccgtgcaggatcggcttcaaggctacgctagtgtccatcactcgttgcagatgccggagtgcagcacgactgtcgaactgacgagctaccttcaaaagctgtgtaaggctctctgtcgttcgaagcttgagagccggaagattgagctggcattgtctctctgtcccgtgtggatcacttccgaacgttgctggctattgggaatgatcgtgtttgagctaattacgaattctgcgcggcacgcgttcctgagcggtacgggtaaaatcgatctggaactgttcacgacgagtaacatgatcgcatgccggatcagtgacaatggcgtggctcatccaggcgctgtgcctggccgaggactgcggatcgttgcagctcttgtctctcgcttacatggaacaatcgacgtgaaatctggacctcagggaactagctcgaccgtgatttttccgatgacctacaatgctgaggcttgccccgcaggagcagatgtagggcggatactcctcggctaggtcgtcggcacggcagtgccgatcgacccgaggcatttcagctaggagccttgtttggtatccggcgtgggttcaatcaacgaaacgggcggcgtgcgccatcctagggtcgatatgggccgcgcacggctcactgatccaagacattgctgcacctcgattacgatccggcacacgtgccgagaatagacgagagagacacgacgatcacctcagagccgtaacttacgctctatgccgtggcgcagtgtcctgatcatgcgatttggaaataaggtggccgctttgaagtcggtcatccctgttgttgatgtattgtttaccgagctgaagcgcttgcgctgacaccaggactgcgcactaagccgtccgagggacaaattagccgagtaggcgataggacacaaagtgtgcaatgatcgcaatcatcggtgtcgctcaggcctcggcgcttacatcttgtggccgcggcgtgccgtgggtgatcggaagtgatacataagataaaagactttcggctgcctaggtcgtcagtcatgcgttatgtcttcgccgtcacgtcgatacttattgtgactgctgtcgcgttggtactgcaatcatacgatttgcgtgacgcagagctgccggctctcgtactcgcgattggaatcgtcacttggtacgcgggcagtggtcccgctgcagttgccgttgtgttagctgcagcgaccttcaactacctgtttgtcgaaccaatctatacattctacgtatctggacaagacttgccctatttcgtgatcttcgtgctttccgcagtaacagtgacgttcttcagcagcgtccgtcgacgcagcgaagaaagccttcgtcaagcgcgcgaccgcctccagatcgagctcgatcagcgccagcggcgggagggtgagatacgtaggttaaatcaggagttgacgttgcgcgcgtcggaactggctgcggctaacaaggagctagagtcgtttacttattccgtttcgcacgacctccgcgcgccgctgcgtcatcttgtcgggttttcggaattattacgcaaacatgcgtcgagttcgctggacgagaaaggccagaagtatgtcgagacgatcttcgatgctggaaagagaatgggcagcttgatcgacgaccttttgacgttctccagaatagggcgaacggaaagcaggatggctaccgttgatctacaagggttgatcacggaagcgattgcggaagttaagcagcagacgaatggccgagacatccactgggaggttggcgcgtttcccgcctgccatggagaccgctcacttctaaagctagtcatgctgaacttgctttccaatgcagtaaagttttcgagccttcgaaagccggcgagaatcgaagtgggcgcattggaggggagtgcgacttcggtggagatctatgtgaaggacaatggtgttggattcgatatggaatacgcgggaaaattatttggggtgtttcagcgcctgcatcggactgacgagttcgaaggcacaggaattggcttggcaaccgttcagcgtatcgcccagcggcatggcggatcagtgcgcgcagaaggggcggttgatcgtggggcgacgttctatgtttcgctgccaagggaaaagtgtccagtggaaagggcgatagacgcatcatgcgcgaactcaggcgaattctgatcgtagacgatgacccgagagacgttgagttgacgttcacggctctcgacgaatacaagctcgccaacgaggttgttgtcactcgagatggcaaggaggcgctggactatctttgtcgtcgagagggttttgcttcgcgagccgaaggcaatccggcagtgatcctattggatctgaagttgccgaaagtcaacggtctggaggtattgcagaagattaggtccgacgaacaattcaagatgattccggtggtcgtgctcacctcatcgcacgaagaaaaggacgtgttggatagctaccagcttggtgtaaacgcatacgtggtcaagccagtcgattttcacgagtttgtggatgcggttaaggaactcggattgttctgggggatcgtgaaccagcctccccccggaagtgcaaagaaagccctatgagtacgcggaccgtgaaaatcctactgcttgaggacgatccaaacgacgctgatctgatcgaagcgctgcttgccgagcactttaggtgtcatgtgatccgtatccagagccgcgcggagttcttgacggcgctccaagatgtcggcaactcagacttgatcctctccgactacaagcttccgtcgttcgacggactgtccgcattgcatttggcgatgagtgtccaccccggcctaccgttcatcttcgtttctggtactctcggcgaagaagcggctattgaagctctgaaagtcggcgccaccgactatgtgttgaagagccggctgtcgagactcatcccagctgttcagcgtgcgctgcgtgaggctagcgatcgggccgcacggcgagcagccgaggacgcgttgcgccggagcgaagcagagcttcgcggcatcatcgatacaataccttcaatagcattcacggctgagcccgatggacgaggtatttggataaaccaccggtgggtcaagtactctggattgaccgtcgaggagacggcgggcgcgggttggcaatcggcgattcactcggatgacctttctgaacatatcgtcaaatggcagcagtcgatgagaagcggcgagccattcgagaacgaggcgcgtcatcgtagtgcggagggtgactaccgatggtttctcgtgcgcgcggtgccactgcacgatgagcagggtaggattctcaaatggtacggaattttgactgatatcgacgacttcagacgtgcggaactcgagcgcgagcgattgcgtcatgaacttgcccagatgaatcgcgtcaacatgatgggagagttagctgcggcactaacgcatgaagtacagcagccgatcgcggctggaatcattaatgccaaggcgtgcagacagtggctgctcgcacatacgcctgacatcaatgaagcgcgcgcagccgccgaggccgtaatgacgagcttatcgttcgcgactgacattattgggcgggtgcgcgctctctatggtcatggaagatcagagcgggaattggtcaacgtcaacgctttggttcgagagatgaccggtgtccttgacccggctgcgagacgctgtctcgtcctattgcggaacgagctcgattcaactgttcccgacgcgttggcggatcgcgtccagctacaacaagtgctgatgaatttgatgttaaacggcatcgaagccatgcaggggaccggtggtgaactgaaggtggagtcggggatgactcatgatggtcaattgctgatatcggtgagtgatactggctgtggacttccggctggcgagcctgagcacatttttaagccgttcttctcgacaaaggcgcaaggtactggcatgggattagccatcagtcggcgtattgttgagtcccacggcggccatttgtgggcatctgcaaacggggatcagggcgcaattctccggtttacgttgcccagtaacaagggaggggggtgatcctccggaatttcggccaagcgtccccgtccttgtcatctcaaagcatcgcgacgaactcgagcgattgattcttcgatacctcggtctgctgccgggccaggaatgcttgtcggtcggcgggccgttcgacgggccgcggttatttgcgggagtccgcctcgttggaggggcaccgagatcatcttcggatgtcgagtgcgtcctcgactagcgagacgcccgtgatgacggagacggttgatggctccgcgtccttcgacagagcctgattgtagcgctcagatatcttcgatcagatctctttacttgcgaggcgatttctacgagctgttagctcgccaagcggccgctgcaagtatgtgagctagcctcatctggattgcaacaagctgattctgtctagcgacgtgtctgccgcccgcgttcgtacgtccgtcgtctatgtgagacgaggaatgatcgcttgcttgcgcgatgttgcggtcgcgtcattgaattgcggacagaacgtgtatgtccgcaaaagccgttctttcgaagaagcccagggcacgaaactctcataggcttgcaggcctttagggacgcgatcgcacggcgttgcgattgaactcacgtcatcgccgaaaacaaggagaggtcgctatgttcgcgaaggttgcagagatgttcgtagagaacctcacggcagcaggcgttaggcgaatctgcggaatcgtcggcgacagcctgaacggattgacgggcgcgatccggcgcgacggcaggatcgagtgtggtcgcatgcgccaccaggaagcggcagccttcgcagcgggtgcggaagctcacttgacgggagagctcgctgtctgcgccggaagttgcggtcgaggaaatttacgtcttcccgcaccgccagccattacgctcgacatggcaaagagcttctcgctctacatgttgaaggcgctgttcaacggtcgcggcgagcatctcgttgatctagccaaaaccaatctgtggtcgtgaacaaaggaaagttctcccatggatcctacggcattgctcctctcgcgcattcagttcggattcgcgatttcgtttcacataatatttccggcctttacgatcggcttggctgcctggcttaccctgcttgaggcactgcacattcgtacgggccgtagagcatatcgcgttcttttcgagttttggctcaggatattcggtgttgcgttcgggatgggcgtggtgtcgggcatcgttatgggattccagttcggaacgaattggagcgaactgtctaggatgagcgggccgatccaagggccgctgttgtcatatgagacgttcacggccttcatgttggaggcgagctttttcggcatcctgatgttcggccgtagccgagtgccagcgtggttctacctcctctcagcagcaatggtatcgcttggaacgacgttgtcggcattttggatcatgaccaacaacagttggatgcaggtcccggtgggctacgccgtagagaacggcgtattcgttcctgaaagctggtcgaagatcattttcaattgggtggtcctcgtccgcttcgtccacatgctgctcgctgcgtatctgaccagtgcattctgtgtggccgcaacaggcgcttggtatctgctgcgctccatccacctcaccgaagcgcgggtgatggtgcacatgggtcttggactcgcggcagtgctcatccccattcaactcctgttcggacatttggtcggtgactacgtccatcagcatcagccggcaaagttcgccgctatcgaagcgcgctggcatgacgaacagccagcaagcgaggtgctgctcgctttgccggatccggcaacggagaccaatcgatacgaaattcggatcccggtcctcggtagcatcatcgcgagcatgagtctctcgtcgaaggaagtcggattgacgagctttccggctcaggacaggccgcctgtccttgctccgttctttgcatttcggatcatggtcggctgtggcatgatcatgctcgtgctttcctggttcggctgttacctcgcgttcaagcgcaggctcgaaggcagccgagctgtgctctggctcatctttctcaacttcccactaccattcattgcgatcctcacgggctggtatacggcggaaattggccggcagccgtggacggtctatggagttctgcgcacatcgcaggctgtcacaccatttttgacggcagaggcggccttcgcgacgctggtgctgttcggtgctgcctatgtcttcatattctcattcggcgtttactacatctataggttgttgcgcgccggtccgcatgctgttgccgctgaaacgccatatggcgccccgtcgggcatctccaccgtatttggtcaagggtctggtgcccgttccgagttgaaagcaggagaatgatgatggtgatgttctgggttgcggttctgtccatcagcactttgatttacctgttgctcgacgggtttgacctcggcgtgggaatcttatgcggtgccacggccaacgtgaaccatcgcagtcagatgttacgtgcaatcgagcccgtctgggacggaaacgagacttggctggtggtatccggggtcattctctggggagcgtttccagtcgtttacgctactctgctgtcggcattctacttgccagtcattgtcatgctgctggggttgatcttgcgcggagtcgcgttcgagtttcgcaatcagggagagggcacgcgctggatatgggatatgagccttacgggcggatctttagttgcagcgtttgcgcagggggccatggttggcgctttggtcgaaggactatcgttcacaaatgggcagtattccggcgggacgttcggctgggtctcggcgttctcagtcatatgcggtgttggactttgctttggttatggtttgcttggtgcctgttggcttgtccgaaagtgcgaccgcgaagttcgtgatgttgcgcgccgtcatatctgcgtgctcgccatcgcaatgacggtgtttcttatagtcgtcttcatacacgctctctttgaacacttgaccattcttcatcgatggctcgagcggccctatcttttcatttttcccgcgattggtgcaatcgcggccggcgttctcgcgcgaagcgtcaagcatcacgatgactattggcctttccacatggtagcgctggtgttcgtggcagcgttcgccacgctagccctctcgttctggccttacatgataccgtttgagatcactattcgtgatgctgctgcgccgcatgcgagtctcgccttcatgttctggggtgcgggcttgttcgtgtttccattaatgctggtctacactgtcgtttcttttcgggtgttcaggggccgaattcagacttgaggtgctgaaatcgcgttgaaatcgcccggtatcttgtatcaaggatggcgagacgacacgtcggagggtcgtctcgcccgtgtctttccatgcctacgttcacaggctgagttttgtgaacggaatgaaccgcgcagtccggctgaactggaccttccgtccgaagctcgcgctgcgcgcgtagagcatgcaaacgtaccaaagcgtcgatcctgcgtggacttgctgagtgtggaaaacttgaacagaccgggaaattgatctctcacggcaaaccacagcctggctgggacgcggtccaactcggactatcgaccgtcttgggttcgaccgaagagttcggtgcgccattcccacgttctaagaccgatttcgcgagtgggcggcgatagataccaaggtttcgaacgccgactcacctgtagaatggcgcaaaacggcatctgctctttattgtagtctcagacggttaggacctgtcttcggctgatgctgagatatcgagcgatgctgggtgcgcttggatggttctgactgttggcgacaacaagagaggatcgttcaaaatgcaaccagtacccatagccctaggcgagttcactctctcgcgcgagagagttgacatgggcgcggtccttccgccggcggaaaaggaggagtctctgcacttcagcggccttgccgatgaacggaagtctggcaaaattcgcgatgacagccaaggcattacgctcgcttttcagcacctgaatgtggtgttggcgatcgccgctcgcaacgttgccaaattgggcggaatggccatgccatcggtcctctatgacgtgttagcagacgatagcaatgatccagttgtagtcaggctgtcagacgctcttaggaccactcaggcaatggaaagtggcgatgccggcatacaagcagatgcattgcggcttgctatcgtagccaggatggtcggactgcacttcaattcgggatatcccgatgaagagaacattgaagcaggcgcgccctgccggccaagtcgcgcgctgcagagatggcgcctcaagcgggttctcgaatacattgatagtcatttgaccgataagatctcgctgcaagatattgctgcagccgctggactaagtcgaatgcacttcgcgtcgcaatttcgagcagccactggaatgcgtcctcacgactatctgcttcgtcagcgaatacggcgggccgagcatcttctgagccaaaccgatctgtctcttgccgagatcgccttgactgtaggctttcgtactcaggcccacttcactagcgtgttcaaacgcttcatgaataatacgccgtatcaatggcgaagtgcgcgccgcttgaacggtgttgccgaaaaataggcgtactccgcctatgagctggagttcaagagccgcatctttttcagctccgccgctgcccaccaaagcatatgccaaacggttgagccgtcgctcaacaggcgtcccactatcggtgcggagacattcggtggtgcagccgcggcgtcgacgactcaaggtgattcatcgtgaaaagtattttgcgcacgcgttggcccgcaacgacgtgctttggaagaaaaatgcgtccatctcggaagaacataaagcgcagcatcgatatgcaagacttctgccgaccaaatgcgaggaatcgaatggccgatctgacaacgaatattcctctgtccttgaaaatggccctggacgctgaggtggcaaggatcggtcgacctttgtcgtctgtcgtaacagctgccttatcagaattccttggcgtatcgatccatacgctgttccaggtctcgatatcaggtgccttggtggcaggcgttttcgatcgagaagttagcgtccgatcgatcctggagcatggagatttcgggctgggcactttcgcgcacttggatggcgaattggtcgtgcttgatggccgagcgtttcaagttctgggcagcggacgagtatcggaagcgactgcgggcgctggcgcacctttcgcggtggtcacgcgctttcacccagacgccgaggccgacattgggcctgtggcaagcttcaaagagttggaaatctgctgcgacaagtttcgcagctctggaaacatcttctacgcaatgcgattggatgggcattttacgcgtgttcgcacgcgggccgtcaatccgcctccgtccggcgggcgtcttgtcgatgccgcgaagacgcagagcgaattcagtttcgcggacatcgacggaactttagtggggctgtggtctcctggcttctcaagtgcgtttagtgttgcgggttatcattatcacttcatctcgaaggaccggcagcacggcgggcatctacttgatgtcgaggcaaagtcgcttcacctcggctttgagccgctaacggagtttcatcttgcgctgccggagtcagaagcctttttgaaggcagatcttagcaagaacacagccgaggagctcgcttatgccgaacaagcccactgaaagccgccaagcccaagcggtggaaactagggcgcagaccggggctgaactggtagttcgaactcttgaagctcaaggcgttacgcacgtccttggagtctccggagccaggatcgacaccgtcttcaatgctcttgccgattccaagattaagacagtcgtttgccgccacgagcagaatgccgcatttatcgcgggtggtatcgggcgcatgactggaaaggctggggtgacactcacgacctctggcccaggcatctcgaaccttacgactggccttgcgacggcgaattccgaaggggacccggtcgtcgcgcttggcggatcggtaccgacgtctgatgcattgaagcaagtgcaccagacgttggatgctgtctctatcatgaggccagtgaccaagttcagtgcgacggtcggcgctcccgaccagttgggtgaggtcctagccaacgcgttccgcgcggccgaatctgggcggcctggcgctgctttcgtcaatctgccggtggatatcatgaccgctccgtgcgcgcacgagcctttagaagtgccggcgttttgtggcctcggccccgccgatgccaatgcaaccagggaggctgcacgtctcatcaacgtggcgtccaatccggtggttctgttgggcatgttggccagtaaaccatccaacaaccgtgctttgcagtcattcttgaccaagggaaacttgcctgtcgtcggtactttccaatcagcaggtgccgtaggagcaatgagtttcgagaatttcggagggcgcgtcggtcagatcgcgaaccagccggcggatcggctcctcgaggcggccgatctcgtgatcaccattggatacaatccggtagagtactggccgtcgctttggaacggaaagcgaaagcgtacgattattcatgtcgacgtgttgccgtctgatctcgacaactgctactcgccaactgtggagctgacgggcagtatcgatcaaacgttggagacgctaacgccagcagtcaagcgaagcacgagatcgccgctgtcgttggaggtcctcgatatgatcgtggccgagcggcaatttctgagaaccgagagcgcgctccggggtggcacgccaatccatcccatgcgtttggtgcatgacttgcagcaattcgttggaggagacacgacgctctgtctcgacattggatcgtttcacctctggtttgcacgacatctctacagctttcggcctcgccaggtcctcatcagcaacggtcagcagacgttgggggtagcgcttccgtggggtatcgccgcttccctcgtaaggccagccgagaagattctctctgtatcgggagacggcggcttccttttctccgctatggagctcgagaccgcagtgcgcttgcgcgcgaatctggtccacatggtctggatcgatggctcctataatatggtggctgtccaggagcagctcaagtacggccggaccactggtgttgatctaggccctgtcgattacgttcggtacgccgaggcgtttggtgcgaagggcctcatgatcgaggagccgaatgatatcgcgccgattatgaggaaggcgtttgagaccgaggggccagtcattattggtgtccacgtcgactatcgcgacaatcacaagctgtttgagatggtgcacgcagggacctttcattgaactgagcgatagaatcgaagcagatggtcgccggcagtcgccgacggtcgggatcgaggccggttgtgctgattaacgcgatcatgtgatttcaaagcgatggctcgattgtaacggcaatacccaacgccatcgattgcggacccgatgagcgcgcaacattgctaaaccggggcgatggcgtgcggtcgtgcgtgagaacgaagagttcgcgacgcactggtttgccggcctcctccatccctgtaatcttttgcctggcgccgccccgcgattgggtcgcaagacgggtctactgggctatctcacttggggcgcacgatagcgtgataggcggcctccttctcaaaggcatgccggtcgtctacgcacgtcttgcaacagcggaatctcaatcgtgcttgaggagggcaacctgttcgagcaggcaatcgtgttgcgggatataccgttttggcctaaattggctgactgaaccctgatgagggctgcgtaagcctgaaggggcttcgttggaatagtcagccgcgcgagaacacaaggtgacgcagcgcaaaccgtcgatgaagactgttgttgatgagtcgcccgtggtgttcgtcgtggatgacgacgactcgatgcgccaagctctatcgaggctttttctctctgtaaaattgcgcgtcgaagcctttgcatcgccgcagcagtttctcgggagtttacggcccgacgtaccgagctgcctcgttcttgacgttcgccttccagggttgaatggtctcgactttcaggctgacctggcgaagactgatatccggactccgattgtgttcatctcaggtcatggagatattccaatgaccgttcgagcgatgaaggcaggcgcgatcgatttccttcagaagcccttccgtgaccaggatctattggatgcagtcgcggcggcgatccgacgggatcaggaccggcgtgacaaggagcgttcgattgcccggttgaagacgaattttgaaaccttaacgactcgcgaacgagagatcatgacgcttgtggctagcggaatgatgagcaagcagatcgcagtcaagtgcgggctcagcgagatcaccgtaaaagtacatcgaagccatcttatgagaaagatgggagcaagaacggcggctgagttggtcaggatggcggaagctctcggcgtcgaacctacttcgttcaaaccatccggcaatcgagcctcaagctgaaggctatcgcaccggtatttcttcaatcgagaatcggaagagtggtccccgatacgctactatctcgaaacctaagtatcgtatttcgacctgtagtgcctgtgctagcctgcgatcgcggcggtgccgaagcgggacggcccttatccggtaggttctcgggaagggtacttgcgtgaaaggtgaaacggtttcgattatcgatgacgatgagtcgttgcgctctgcggtcgtccggctgctgagatccatgggattttgcgctgagtcctttgcgtctgcgcacgaatatctctcgttgcgtcgggcagatgacacgctttgtctgatagcagatgttgaaatgcccggcatgggcggaattgagttgcaggagcatttgatcacccttggatacgaaacacccatcatcttcattaccgcatttcccgaggatcaactcagggatcgagcaatgagggcgggtgcagtcgatcttcttgctaagcccttcgatgagacgagattgctagcatgcattcagagagccttactcagaaagcgcagcgcatcagataacaggcgctcgtagttagattgaacctcgacgaatgcccgacactgcgaaagcaggtcgcggctcgcggtcaaaggctccgctaggaggaagtctgcaagtgagcggttctctcgatgccaactcctccggtgcgtctgacctacaagtcttgtggcgagacgatgagaagatcctctgtcgaagatcgggtggagttgcgggggctgatacagcaacggttctggcaataatcccgttgtcagagcgtccttcatcgtctgttttagatcgcctggcccacgaataccatttgagagaagacctggatgcctcttgggcggtccgtccgcttgagctcttcatcgaggcaggtaggaccgctctgatgatggaggatcctggcggcgagccgttacaggggctgctccgttcccccatgaatctttccagctttttgcgcttggccatcgacgtcaccgcggtgttgggcaaggtccaccagcgaggccttgtccacaaggatataaaaccccttcatatcttcgtgggttgcagggacgaccgggtgcggctcaccgggttcgggattgcttcgcggttgcagcgcgagcgatacactcccgcgccacctgagttcatcgccgggacgctcgcctacatggcgcccgagcaaacgggacgtatgaaccgatcagtcgaccatcgcagtgacctctactcactgggtgtcacgttctaccaaatgctgacggggcagctccccttcgtcgcaaccgatcccacggagtgggtacactgccatatagccagacggccgattccacccagtgagttgctgccaagtattccgaagtcagtcgccgccatcgttatgaagttgctcgcaaagacggcggaagaccgctatcagaccgcgggcggcgccgaacgtgatctgcgacgttgtcttgatgattgggacaggcgtcaggtgatagacgacttcccgctggggcagtatgacgtgcccgatcggctcatgatgcccgagaaattgtacgggagggagcctgagatcaatgcgttactcgcagcgttcgatcgtatagcgcgcggggaggcgcctatcttggcgctggtgtcgggaaagtccggtatcggcaagtcggccgtcgtcaatgagttctacagaacgctcgtaccgcgtcgagggctgctttcgggcggtaagttcgaccagtatatgcatgacatcccatattctacctttaagcaagcgttgcaggcccccatccgcgcgcttctcgggaagagtgaggcagagctgaacgagtggcgtagcgcgctgcaggaggccctagaaccgaacgggcggctcgttgttgaccttgtgccggaactaggactgattcttggcgatcagccgccagtcgttgaattgcctcctacggattcccagcgtcgattccaactcgtactcgggcgctttcttgcggtctttgcgcgccccgagcatccatttgttttgtttctcgacgacctgcagtggctagatatcgcgacgctcgagctaattgaatatctgcttgttcaatccgacctgcgattcttgatgctgatcggcgcgtatcgagatgacgaggttgattccgaacatccgcttacgagcaagattggggcaatacgccgtgccggaggtcttgttgaagagatccgccttggcccacttggtaacgaacaggtggcagagctggtgacggatgcgcttcgctgccagccatcgtgcgcagcacccctggcggagatagtgcacaagaagacgtccggaaatcccttctttgtgactcagttcttgcagaccctggccgatgaaagggtgctctcgtttgatctcggcgcgctacgctggaattgggatcttaggagtcttcacgctaacacatatgccgatagcgttgtaaagctggtagttggaaagctacttcatttgccggctaagacacaaagggcacttcagctcttcgcatgccttggagcgagcgctcatactgagatgctatcgatcgttctcggcagcccgaaggagcaggtgcatttggtcctggcggcggcggtgcgtcaggagctggtcgagcgccgcggaatgcagtaccactttactcacgatagggtgcgggaagccgcctactctctaattgcagaaccatcccgtgctgccaaccacctgcagattgggaggctgctgaaggcaaaaacgcctcctgagcgcctggaggaggcggtcttcgaaatagttagtcaactcaatctcgggatgtcggctgcaggttcgtccgacgaacgcgatgaaatggcgcagctgaatctgatcgcgggaaatcgcgccaaagcgtcgaccgcctatgtgtcagcgtcgacatacttcaaggccggacaggagcaactcggagatgaccgttgggtgcggcagcgtcaactgagcttccagctcgatctacaacgggctgagtgcgagtttctcgtcggagagttcgatgccgcggaagagcgactaacggaactctcgcggcaggcgtccgacacagttgaacgagcgaacgtcgcatgtattcggattgatctctacaccacgctgaatcgaagcgatcgagctgttgccgttggcctggagtaccttagtcatctcggtgtcatgtggtcggcacatccgacggagcaggaggcgcgcgacgaatatgcacgcatatggtcgcatcttggagacgacctagaaatcaaagatcttcttgatctacgactgatgactgaccctggctcgcttgcgacccttgacgttatcagcaagattctcccgccggcgttgttcacggacgccaatctcttctcggttgccagctgtcgtgcggtcaatctaagcatcgagaatgggaactgcgatgcatcatgtgtggcatatgtctggctgggaatgatagcaggaccgcggttcgagaattattccgcgggatttgagtttgctcgggttggatatgacctggtcgaaaagcgcggtttaaaacgcttcaccgctcgaacatatctttggttcgcgcagttcgtaatgccgtggaatcggcacatcatcttatgccgggatttgatgcggcaagcgttcgacgccgccaacaaggttggcgatatgacgatcgccggatacgcctgcaataacctcaacacaaatatgctagcggcaggtgattcactcgctctgactcagtcggaagcggaaaaggggtttgaatttgcgcagaaggcgagattcggctttgtctcagacattatcgccgcgcagcttggactcattcgaacgttacgcggcctaacgcaaaagtttggttgttttgacaatgatacattcaatgagagtgaatttgaacgccatcttgccgcagatggcacattggcgctgcctgaatgctggtactggacgcgaaaactgcaagctaggttctttgctggagactatgacgtagctgtcgatgcgacccttagagcagatcgtctgatttggacaacgccagcgattttcgaaaaggctgagtgctatttctacggcgcattggcgatagctgcgcgttgtgacatcgctgccggcccgcagggctgccaatacttcgaaatgttacagaaatacagccgacagcttgagatctggtcccaaaattgcggcgagaacttcgatggtcgggctgcgcttgttcgtgcggagatcgccagaatcgagggacgtgagctagatgcggaacgttcgtacgagcaagcgattagctcatcgcggacgaacggatttgtccatattgaggcggtggcgaatgagcgtgctgcgctgttctacgccgttcgtggttttcgaaggatctccgacgtcctcctatacgatgctcgttactgctacctgcgatggggagctgatggaaaagtgcagcagctcgatgaggaccatccacgtctcgcgaccaatatttacgaatcgggctcgacgagcactatcggggagccgatcgaacggctggacttggccacggtaattcaggtctcgcaagcggttgccggtgagattgttctggatagattgatcgacacgttgctacgtaatgctctcactcacgcaggtgccgagcgtgcactgttaattgttcttggcgaagtcggacatcaaatagcggctgaagcgaccattagcgacagcggattgatcgttcgggctcgcgaagctgttgactcggcgcatccggaatccgtcgttcaatacgtcgtccgcacggccgacacagttgttatagatgacgccatgatccagcctgaatttgcaatggatccctatgtgcggcagcgacaggtccgttcagttctttgtttgccgctgacgacacaggcgcggcttgtggcggtgctctatctcgaaaacaatctggcgcctcgcgtgttcgttccggcgaggagcgccatcctcaaactgttggcgtcgcaggctgcaatcgcttacgaaaatgccagactttacaaggatctggcggtgcgggaagctaagatccggcgcttggtcgacacgagcattgtaggaattgctatcacgttgcgaactggcgaaattgtcgaagccaatgatgcgttcctcaagattgttggctacgaccgggcagacctttcagagcaccgcatccgctggacggagctcatggcgtcggggtggcagagcagcactgaccaagtcaggcgggagctattagctcccgctgtcatccagccttacgaacaggaatgtttgcgcaaagatggcacgcgagtgcctgtattgattggatcggcgacattcgatgagcgtcaggcagatggggtagtttttgtactcgatctgtcgaagcttaagcaggccgaagcaggggcacgcaaaatggagcgcgagttggcgcatgccaatcgagttgcgaccatggggctactcacggcatcgatagcacacgagatacagcaaccgatagccgcgacggtcacgaatgccaatgctggacttaggttcctcaatgcgagtcctgtggacttggaagaaattcaacttattcttggcgatatcgtcaaggatggaagccgggcgggcgagatcatcagccggactcgtgctttgatcggaaaagtgcctcctcggagggatgcattggaagtcaacgagacgatccgagaggtgctcgagctcactaggggcgaaacgacgaagaacaatgtgctggttctgaccgagtttggagaacgtctgccagcgattcgcggagatcgagtggaactgcagcaagtcgtactcaaccttatcgtcaatgcgattgaagcgatggatgccgttagcggcggttcccggcaactaatgattactactgctacagttgatgcgggcgtactcgtcagcgtccaggacgccggccccggactgccatcgttggctgtcgatgacctgttcgccgcattttatacgaccaagcagagaggtttggggctcgggttgtctatttgccggtcaatcgttgaggggcatggtggacaactgaccgcccggcagggactcagagggggcgcagtctttgaatttaccattccagcggcgggcaccgactagtcacacccgatggcgctttaggcaacgtagcgcgatcatgattgcggtggtcagtccgacgtcaatttttgaaattcccgctggcgcatagtccaaggctaaggcgaccttggagagatggcgcagcgatgaaccgaaatagtactcgagcaaggctattccttcgccgcaatcgagggattgaaagtcaacgccgccgggtgtccgacagcgattttagctactccgacgattgcggccacggcgtgcacttagggaataatgtcagtccctttggaagatttgatggatcattgtccggtatcttgtatcgagaaattcaacgtcttcgcgtttagtgcttcggcgatcgggaggggactggaatgacttatctgcgccggcagggatcgtaccacacgagttcggtcgccacggaggtcagctttgatagctgaaggtttaggtgctcagatgaaaacacaaaggcccccaagcgtggtgcgatcaggagactcgaaacctaagtatagttctcgatctgaaattgctatgttatttggtggaccggtggtttctggcacagatgccactgggtctctatcctctcaatgaagagagaccgtcacgtggaagtgccgacggttttggtggttgatgatgacgtctcgctacgcggggcgaccgtgcgattgctcaaggcgatggggtttttggcgcgcggttttgcgtcggcggaagagctgttatcgtcgcctcatttaaatgaggcatgctgcctgatagtagatgtggccatgccagggatgagtggtcttgatctgcaagagcgtttgattgctcaaggtcggctagtcccaatggtctttataaccgccttctctgacgagcgggtacgaagtcaggctatgaagcacggagctattggctttctaaccaaaccctttgatgagtctgtgcttcttgaatgtgtcaatgaggctttgaaacgtcggtcagataccgatgaggcgtgatcgaaactgaacacctgtgtggtcgcgttttcctcgtggcgatgtgcgagcgttcgaggaactgctgtcgatcgagggcgacctagcggatcgctaatgagcgtaatgaggtttttcgggacggagccggacccacgcgtgtcaaacaacaggctcgtcaagtgagtcgatccctttccatcgatggcctcggcgtagatggggtcgaggtcgtgtctcaggatagcgatcgagtcttgtaccgaacgaagcggcgagggaaagatggtggggcggacgccgtgctcgtcttggtacccaccgtggatcgaccctcgccatcaaccgtggagcggctaaagcgagaatatgagctgaggcacgaacttgcgttggcaggtgccattcggcctttggagcttgcgagcagagcagggcagacggccctggtgcttgaggatcctggcggcgagccgctccagggactgcttggcgcagccatggatccgaaggactttcttcatttggcgctcggcaccgtagctgcgttaggctctgtccatcggcacggtatcgttcacaaagacataaagcccgctcatatactggtgaactgcctggacggacgggtgcgtctgaccgggtttggcatcgcttcgcgcttgcggcgcgagcgacatggcttgggaccgcccgaattgatcgccggcacatttgcgtacatggcccccgagcagacaggacgcatgaaccgctcggtcgactctcggagtgatctctatgcactcggtgtcaccttttatcagatgctgacggggcaactgccctttgtcgccgcagacccaatggggtgggtgaactgccatatcgctcagcgaccggtttccgtccgtgagcgaagacctgatatctcggacgcgatctccgcgatcgtgatgaagctgctcgcgaaaactgccgaagatcgctaccagactgcaattggtgtggaagaagatctgagacgctgtctggcaaacgtcgagatcggctcgccgtcttcgagctttccactcggtcaaaacgacgtccctgatcggctcataattccggagaaattgtatggaaggctgagcgagatccgggccctgcttgcggccttcgatcatgtcgtgaggaccggctcgacagaactcgtgctgatctctggttacgcggggatcggaaagtcatccgttgttggcgaactgcataagtccgtggtgacgccccgaggcgttgtcgcctctggcaaatgcgacccccaccagcgcaatgttccttactttccggtggtgcaggcctttgaagggctcgtacaatcacttctcagcactaacgacgccgagctcgctagttggcgtctctcgcttcaggaggctttagggcccaatgggcgacttgtagtggatctagtccctgagttgaggctcattgttggtgaaccaccgccggtgccagaacttccggcgcagcaggcccaaagccggttccagctgacaatccgacgcttcgtcgctgctctagctcgtgcggaacatccgctgatcttgatcatcgatgacctgcagtgggtggacgcggcgacgctggatctcatcgaggatttgctaacccggtccaatttgcaacacctgcttttggtgggtgcctatcgagataacgaagtcgaagccaaccacccgttgataaggcgactcgagaggatacgtgagctcgacgggaggatccgtgcgatcgaactttctgctctgacggtgcacgacttgcagcagcttatcgcagacacactccacagtgagctcgcaagcgtagcccagctcgcgcaaattgtttatcagaagacgggcggcaatccgttttttgtcagccaatttgtctctctcctggctgaggaaggctcgcttacattcgactatacctcagcgaggtggtcttgggatctcgagcgtatccgcgccatgggatgtaccgacaacgttgtggatctcatggtcggcaagctggcacgtttgcccattaaaacccaggcggcgctgcgatatctggcctgtctcggcaatgctgccggaaccacgctgctgtctacgatcctcgagtcgacgaaggaaggcgtggaggccgcactgtggccggcgctccatctcggtctgttggagcggcgagccgattcttatcggttcgcgcatgatcgagttcaggaggcggcgtattcgatgatctccgaagaggagcgtgccgactatcatcttttgatcggccatctcatgctcactcagacggcgcttgagcggcgtgaagaggcaatattcgatattgtcaatcaactcaatcatggcgtggcgcgtatcgatcgtgacaagcgcgaacaactcgctgagctcaacctcctcgcagcacggcgagcaaaggactcgaatgcctatgcatctgcgctctcctatctcagtgcaggtgctggtctgttgtcagaccattcacaaaagcgccagttgcagctgccgttatcatttgagctcattcgcgctgaatgcgaattcctgaccggagcgttgaccgaagccgagcaaagattggaattgctctcagctcgtgctatcactaccgctgatcgggccgctattacgtcattgcagattgatctgcacacaacgtttgggcgaaatgaacgtgccgtgcttgtcggtttggcgtatctgaaccacctcggttgcaactggagtttgcagccgacagacgatgaagcgcgtcggcagtacaatcacatttgctcgcaactcaaggaccgtacagtcgaggatttgctaaaattccctctcttgctggctcccgaagcgctcgcgacgatcgatatcttgctcaagatgtcaacgccggctttcctttccgatcctaatttgtggatattggctgtatgcaaagttttgagcattggcttagagcaagggaacagcgaagggacgtgtctggcgtatgtgggcctcggcctgatcgctggaaagcatttcggtgattatgagaacgcatttcgattcggacagactggctatgaactcatcgaaaggctcggcttcactcgtctaaagccacgcatatatctgcatttcggcgcccagttgatgttgttgacgaaacacgtgcgggcgggacgggaactattacgacgagcggcggagttggcgagggagaacggggatcttcttttcgccggatacagtgacgctgttctagttgagaatatgctcgcgtccggggacgcgctccttgatgcagaaaaggcggcggtagccggtcttgaattcgcgaggaaagcgaggtttagcccggtcgtcgactggcttggggggctgcttggccttatacagatgctccgtgggcgcggtccgaaatttggttctctaggcggtgatgagctcgaagagcgcaaaatcgaaagcgatttgttggacagtggtcggaccggtcggaagtactggatacacaagctccgggctcgctttttcgctggcgaatatgccgaggcccttgagattgggcgcatagtcgaaaaactgctgtggtcgctaccctcaccgatcgaagcggccgactactacctttacagttcgctcagtctgtcggcccaccatggctctgtcgtttccggtgatgatccatcgaccctagaaacgctcatatctaatcacgaagaacttgaggctctggcgagtgcttgctccgagaacttcgcagaccaagccgctctcgttggagctgagatcgcacgtattcgaggaaaagacattgaggcaatgcgtctgttcgagtcggcgattcgatctgcccgctcgagcggcttcgtgcaaaatgaggcgcttgcgcatgaactagccgctcgattctatctcgctcatggtcttgaaacagtgggtcgcgtccatctccaagaggcgcggtactgctacaagcgctggggagcagatggaaaggtgcttcagctagacgcgttgcatccgtgcctcggggctctggatcggaatcccttcggaacgcggaccatcgagcagccgatcgaacacctggacttggcgattgtgctgcaaatatcacaggcaattgccggtgagattgcgctcgaaaggttggtagaaaagctaactcgactggcacttgctcaggcaggcgctgaacgagcggtgctcgttctgtcggagggaatggaagagcggattgttgccgaagcgaccgcaaacaatgatggcgggggagcgcgttttcaatgccgtctggatacggcgttgccgagatcagtcctacaatatgtcatgagaacgcgaaagaccgtcattctcgacgatgccacggtcgaaccgtcgttcgccgctgatcgctatatacaggatcggcgggcacgctctgttctttgtttgcctctcgtgacgcaagacaaactagtcggagcaatctatcttgaaaataaccttgtgccccgagcatttgtcccgaccggaacagcggttctcaagctgctggcatctcaagcggccatagctcttgagaacgcccgattgtatcgtgagctcgaagagcgggaagccaagatccggaggttggtcgacgccaacattgtcggaatatgcatctccggccgcgacggtgggatcttcgaggcaaacgatgcgttccttaagatcgcgggatatgagcgcgaagacctctctgcggggcgccttcgttgggccgatctgacggggccagcacggctcggggtcgcaaccgttcctttcgcggcgcttgaagcgaacggtgcggtccagcaattcgaagatgaatacgtccgcagggacggcacgcgcgttccggtgatggttgggaccgctgcgattgatgagcggcaagaccgatgggtgacttttgttgttgacctaaccgagcgtaagcgcgcggaagcgcaagcgcgacgcatggagaaggaactcgcacatgcgaatcgcgtcgcgacgatggggcagctcacagcgtcaatagcgcatgaagtgaagcagccgattggggcaatggtcaccaacgctcaagcggcccagcgcttgctgcgcgcggagccgccagatctagaggaagcgtgggaagcacttatgcagatcgcgcaggacggcaagcgtgccggcgacgtcatcgacagaatacgcggcctcgttaagcggacttccttgagcagcaagccgcttgatatcaaccagggcatcctcgaggttgtggagctcactcgtggagaagcagtcaagtatggcgtttgcgtgcgcactgacctctcagcccaccttccgcccgtgaagggcgatcgggtggaactgcagcaggtggtgttgaacctcgtgatcaacgcgatggaagcgacgcagagcgtcgatgatcgttcgcgagaggtgctgatcgagaccgcggttgacaattcggatgtccttgtaagggtacgggatacggggggcgggctatcgtcgtttgctatcgaaaggctctttacagcattcttcacgacgaagcctggcggactcgggcttggcttgtcgatctgtcaatcaattatcgagtcgcatggtgggcggctatttgcgggcgcgaatgttccccgcggagcggtttttcagttcactctgcccgctattgttgattaattgcaaaggccacatggagcacctgcctgggagcactgatcgcgcatgggaccgcgttacgctaagcagaagcgctgagtgtagccgtggctgtcaagagaaatcgctgggcggcgtatcgcaaacatcgacgtccggaccggtcggggcgtcggagcggggcaatcgcagtctgattgcgtgtcgggggtacgatccgtccgtccgtggcgtctcaacagccacaaggtggttgcccgccgagctcagagggatcgtcagaattaggaacgttgctaatcggacttggtccacccggtcggtagccttggcttggaaaacccgcggtgaaacttgggcgaacgacaacacgatctcgccgatggcgttgctcggtcgcttgggtactcgtcaaagcagtcaagccgagcaacaagctcaaagccaatgaaacgcgcatcgtctttctccattgctctatgccagaagagtagtgggcttcagctggacttctgcgagggttctcaacagtgctgcgaggcggctacttccgtcggtgcctacgattgggccaaattctaacgtggaagttctttggggttcgtcgctcgactaggggtctgcaagtttcgggatagccacgccgccagtgtgttgccgagtttgagatcgggagcgggcagaatgcgaatcacattccgcccgctagtagttcagtaccaacgcgccggttcgcagggaggcctccggtaaggatcggacgcaaatgcgccgacatccggagcgcgaatgcaatgacggccattgatgtgcacgacgttcgaactttcgacaacagccccgctcttgtcatgccaggacttgacgtggtgcttgcgcgccatagctggggcggtgatcaggactgcagcgatcaatcctgctgagagacgtacaaaattactcattggcttctccgcgcgaaaataacgagaccaaaacatttggctcttcatccacctaggagacattgaatagttgctctattgcacgggggtttaactgatcgctactttagtgatggacgcgatacccaaagtatcggggggccgcagcggatggggcttttcgttccaagtcccggcaccactggaaaggctcggctgtctgaagggcttgagtgatgacaggatctatgagctcgtatcgactccgcatgtaacgagaagtccactccgacatgacatgtgcaaaccgccagacggttgaaggaataaaatgcaaaacggatgcctcccttgctcccatctacggatcatcgtgctgacaacatttgagcgggcgtggtctgacgggcgccttggcgtcgaggatccctgaacgctccgactaaagatcgaaggcttagcttacaacgcttgttctcggagcatgtattgtgtcaatcgcattgtcgtcggacaatagactgcgagcgcgataccaagtgctccagaacagggtgctccggcggcaagggcagtgtggtggccagcggcattgcggctctgttcatgttgcagttgggtcaagtcgcgcttgcgacaggtgccggaactggcggctgcgcacgctcgtcgcggcttcaagcgcaaaaacggcaggttttggcgtgcccagttctgtacggaagtggcgcacccgacacgattcgaacgtgtgacctttgcctttatcgccgccaggctttgaataagcgccgaactttgaccccaatcagcttacaacattgaccccatacgtaatgaacattcccgtgacggttcaatgaattcggctgtgttggccagggtcaaccttcggcgccgatcggggggcaaaccgcgcgccgaacaacagcgagtggacccagcattccgacagatcaaaaggctctcgttcgttcaatgctgttccatctgcccatttgtcggaatagctactgatatttcttgcaaatcatgcgtctcttaatcagcggctttgttggagtatctccaccaatcgatgagtgggggatgattagatttgccatgacccaagttggaccagcccatcgagcgatttgcgatgcgcgaactgtcgcacgaacgaaagcgcacgtatctggtgcggtttctggtgcggccgtcgcgctacgggcaacgaggacccagtaagttattgatcctcttggtgggcccggcaggactcgaacctgcaaccagaccgttatgagcggccggctctaaccattgagctacaggccccgccgccttgcgggccgcggaggggcggccggcaacggtgcgggctccgtttacagggtgcgtggggtttcggcaatgccgcgcgggaggccccgggcgccgcatccggcggcgcggccgaatcccacggcgcgccgtaggggacagcggtggggagccattggcggcgcgctcggcggccggcgcctcagtccaccgagacgccggcgaactccaccaccttgcgccatttctcggtctcgtccgccaccagtctgccgaattcggccggggtcatcggcttcgggatgccgccgacctcggcgagtcgcgccaccagcttggggtccttcagagcctcgccgaccgccttgttcagcgcatcgacgatttccggcggcgtgcccttcggcgcggagatgccgtagaagccgaccgattcgaagcccggcacggtctcggcgatcgcgggcacatcgggcacgcccggccagcgcgtcggcgaggtgacgccgagcgcccggacgctgccgccgcgcgactgctccagcgcagatggcaggttgtcgaagatcagctgcaccttgttggagatgatgtcggggaaggcgatcgccgagccgcggtacggcacgtgctgcatgtcgcatttggtcatcgccttgaatagctcggccgacatgtgcaccgaggtgccgttgccggacgaggcgtaggcgatcttgcccgggttggccctgcagtagtcgatgaattcctgaaccgtcttcaccggcatcgcattcgagaccaccagcatgttggtgagttgcatgatgctggcgaccggcgtggtgtcgcgcaggaagtcgtagggcagcttcttgtagagcgaggccgagatcgcattgttgggcgcgacgaatagcagcgtgtaaccgtccgccggcgagttgatcgcggcggcggccgcgatgttgccgccggagccggcgcggttctcgaccacgaattgctggccgagacggtccgacagccactggctcatgatgcgggcgacgatgtcgaccgggccgccggcggcaaacccgatcagccagcgcaccggccggttcggatagtcggatgcggttgaggggctgagcgaagcaagacagcaggccaaaccaagcaaggcggcacgtgcgaaccggatcatcatgtctcccgtcattttctcgtgactgttgccgtcatggtttcacaaaacgccgcctttgcctacgacaccgcccgtgcgacgatagtcttgctcatgtgcaatgcttgaggctcgggatgaaattcgctgttatgatctgcgccggcgcgctgctggcgggcggcgcggcggcgcaagaggggggcaagaccatttccaaaactacgatcagtttcgccacggcgacgccgggcggcggctttccgctctatggcaacgccctcgccgaggtgatgaacgcggccgatccgacactgtcgatcgaaccgcgcaacaccaagggctccagcgagaacattccgctgctcgaggccgacagcgtcgacatcgcaaccgttgccggcgagccggcctacgaggccttcatgggcatcggccggccgaaggcgacgaaactcaggatcctcaccgcgatgtattcggcccccggcatgttcgtggtgcgcgccgacagcccgtaccggacgatccaggatctggtcggaaaatcggttgcgttcggcgccaaggggtccggcattccgatcctgtcgcgctacatcctcgacggcatcgggctgaagcaggacgaggatttcaaatcggtctatctcgatcgcgccggcgatggccccgcgatgctggaagatggccgcgtcgccgcgctgtggggcgccggaatcggctggccgagtttcaccaagctcgccgaaagcgcgacgggagcgcggttcattgcgccgaccgcggacgagatcgcgcgcgtccgcgccaagcacagtttcctcaagccgctgacgatccccgccggcagctatccgaagcagaacgagccgatcgtttcgatcggctcctggagctacatcctggtgcgcgacagcttgcccgacgacgtcgcctatcggctggcgaagacgttgcatggcgccgaggctgatttctgcaagaagctcgtccaggcctgcgagaccaccgcggcgaacaccgtcgccgcggcgcccgatcccaacctgatccaccccggcgtgctgagatatttccgcgagatcggggtggcgcgctagcgcggcaaacagtgagtggcgaatagctgacggtcgcacctattcgctaccctctatccgtcattcgctgatctcacttctttgccatcgcacaggccggatccggcggcccgaatgcgtcctcgcccgagatcttggccaggatcttgtaataatcccatggatatttcgactccgccggtgtcttgacctgaaccagccagaggtcgtgcaccatcagattgtcctcgcgcagcctgccgttgcgggcgaagaaatcctccaccggcttctcgcgcatcttggccgcgaccttgagcggatcgtcggtgccggtctccttgatcgcgttcagataggcggtcaccgaggaatagacgccggcctgccacatcgtcggcatccggttcatcttggcgaaatagcgcttcgaccattcgcgggtcttgtcgtccatgtcccagtagaacgacgtggtcagcagcaggccctgcgcggccgacaggccgatcgaatggatgtcggtgatcagcgccagcagcgcggccatctgctggccgccggcgaagacaccgaactcggcggcggtcttgatctcgttggtgttgttcggcggcccgccggcgatgccgatgatcttggccttggaggcctgcgcctgcaggatgaaggacgacaggtcaggcgtcgcgaacggcggccgcactgcgccgagcaccttgccgccgttcctggtcacgacggcggaggcatccttctccagcgaatggccgaacgcgtagtcgtcggtgatgaagaaccagctgtcgccgccccgcttcacgacttcctgcgcggtgccgaccgcgagcgcacgggtgtcgaacacccactgcatcgcatagggcgagcagaacttgccgtggaagtcggtcgcgccggtcgagtgcgtgatgaacagcttcttcttctcgttggcgatgttctgcaccgcaagcccgaccgccgacaccggcacgtcgacgatgaggtcgacctgatcgacgtcgtaccagcgccgcgcgatggtcgcgccgatatcgggcttgagctggtgatcgccgacgatcaccgtaacaggcttgccgagcacggtgccgccgaaatcgtccaccgccatctgtgcggcggtgaccgagccctgtccggtcggcgtcgaagccgggccgttcatgtcggtcagtacgccgatcttgacgatgtcgtcggatacctgcgccgatacggccgaggaagccagcagcgcggctgcgagcgtcccgaacatggctagtctggtcgcgatcattctgtctccctcccgatttggcacattggccattatggttgtgccgggcctctggaacccggtcatattggtttcttttgcaactagtttggggtccgcgtcaacgcgccatcggtctaatgacggggacccggaccggcccaaaccggtttctttcaccgccgattcagtccatagcgggccatggtcaccacccagcgcctcccgacctcgctcaccccgctcgatacggcgctggccgccgtgctgcgcgacgtcgcgctggttgcgccgatcgagttgtcgcctgcggacgctttgcactgcatcgcggccgagatgccggccgcgcgccaatacccgccgcacgatgtcgcgatcaacgacggttgggcgatgcgcgccaatgatctggtcggcgcgtcctcctatgcgccgttggcacaggccgaactcccggtctgggtcgcagccggcgctgcgatgcccgatggcaccgattgcgtcgtcgacgacgatgcggtggacagctccggtccactgccgcaggtgctcaccgaggccatcccggggcagggtgtccggcgtgccggcagcgacatcgctgcggggcgcgcggtgatgccggcgggagagccgctgctgccgcgtgctttgctgctcgcgcgggcggccggacttgagctgttgcgcgtaagacgtcctcggctgcgcgtcgtcaatatcggcaacggcgagctgaccgcgcaactgatcgccgataccgcgcgccttgcaggcgctgaggtcatctgcacgacggtgacgccggatgtggcggcggttgcgagccggctcgatcccgatggctgcgatctcatcgtcacgatcgggggcaccggtgttggtcacacggacgcggtcgtcaatgcgctggtgaaaaatggcgccctgattgcgcacggcattgcactgcaacccgggcgcactgctgcggttggccggatcgacacgattccgatcgtcgccttgcccggcgcgccggatcaggctttcgcggcctggtgggcgattgcgcttccggtgcttgatcgcctgtcgggccggcgcccgcgcaaatcgctgacactgccgctggaacgcaagatcgcttccggcgtcggtgttgcagaggtcgtgctgctggcgcgtggtcaaggctgctgggacgtgctggcgaccggtgacctgtcgctcgatcccatcgcgcgcgccgaagctctgctgatcgtgcccggcgcggcggagggcttcgctgcaggcacggccgtcgatgcctatatcttgcgggagtgagttcccgggatgaccagtattttcacgccgagccccaagccgtccatcgaacaggaccagttcctgaccatccggtcgcgcgaggaggcccttgcgcggttcgaggcggcgctgttcccgcgccaattgccgtccgagacgcgacggctcgccgacgcgctcggccgtgcgctggcggaggacgtggtggcgccaatcgacgtgccgccgttcgatcgctccaatgtcgatggcttcgccgtgcgctcggccgatcttgcgcgcgccagcgagggcacgccggtgcgactggcgctgaccgacgagaccatttcgtgcggcatcgccccgacccggccggtgctccccggcactgcgaccgcgatcgcgaccggcggtccggtgccgcgcggcgccgacgccatcgtgatgatcgagcacacccaacccgtcggcgaggccggcggcgacggcgccatcgaggtgcggcgcgcggcgtcgcccgggcagttcgtgtcctatgcaggttccgacatcgcgcgcggcgaggcgctgctgcgctccgggacgatcgtcggctcgcgcgagatcggcatgctcgcggcctgcggcatcgccgaggttctggtgacgcgccgtccgcgggtcgcgatcctctccaccggcgacgagctggtccagccgggcgacggactgcggccggccgcgatctacgacaccaatggcgcgatcgtcacggcggcgattgccgagaacggcggtgatgcgtcgttcctcggcgcgatcgcggacaatgcggcgatgctggaagccgcgatgcgcaaggcgctggcggacagcgacatgctggtgctgtcgggcggcacctccaagggcgcaggcgacgtctcgcaccggatcatcggagggctcggcaagcccgggatcatcgcgcatggcgtggcgctgaagcccggcaaaccgctgtgccttgcggtctgcgacggcaagccggtggtcatcctgccgggctttccgacctcggccatgttcacctttcacgacatgatcgtgccggtgctgcggcggatggccggcctgccgccgcgttccgacgccaaggtggcggtgaaggtgccggtgcgtatcgcttccgagctcgggcgcaccgagtttgtgatggtgtcgctggttgaaggtgccgatggcctgatcgcctatccgagcggcaagggctctggcgcgatcacctcgttcgcgcaggccgatggtttcctgaagatcgaggcgctggccgaccagttgccgggcggcagcgaggccgaggtgacgctgttcacgccgcatgtgcgggtgccggatctcgtcatcgtcggcagccattgcaccgggctcgatctcgtcaccgcgccgctggcgcatgccgggcttgtggtgcgatcgatcgcggtcggcagtctgggcggtctcgcggcggccaagcgcggcgaatgcgatctcgccccgatccatctgttcgacgacaagaccgagacctacaacacgccgtatctggccgacggcctcgagctggtgccgggttggcggcgcatgcagggcatcgtgttccgcaaggacgacacccgctttgccggcctgagcgcagagcaggcggtgcgcgccgcgctcgccgatcccgcctgcatcatggtcaaccgcaaccagggcgccggcacccgcatcctgatcgatcgcctgctggcgggcagccggcccgacgggtactggaatcagccgcgctcgcacaatgcggtcgccgccgcggtggcgcagcatcgcgccgactggggcatgacgatcgcgcctgtcgcccacgcgtccggcctcggtttcattccgctggccgaggagcattatgacttcgcactggtgacggcgcgcaagcaacgccccgcggtgcaggcctttctcgacgcgctggcgtcggaggagggccgcgcggcgttggtgagggcagggttcaggccggcgtagctcccctacaccgctgtcgtcctggcgaaagccaggacccataaccaccgcattggattgtgaaggggatcgcggccccagcaccgcgcagcaattctcatttggggtaatgggtcctggctttcgccaggacgacgatgaggatggttcttgattcaagggacttaacgtagatcaacctggccgcttggggtccggctcagtgccgcatggcggcctccacgaactccagcacggagcgcgggacctcttcgtattcgacgaaacgacggcgaagctcgtcggcaatgtcggtcgtgacgtcgcgggaccatccttcgctggtattgaacgccacgatgcggaccggatggctgtactggtcatcgagcagacgccggatcagcgttttccggtcggcgccttcctcgtcggtctcgcaccaggcacggccgagccggccgaaatcgttcagcaccagataggtgtcgtggtcgacttgatgcggcacgatcgaaggcgagcgaggcatatttttggtcctccgatgatgcaatttatcgcgttccggccaccccgcacattggaaacttcgaggtatatccgttggaccgccacggccctgcgaggcggatcaatccggcgacggcaaatcgcgccggtcggctggcatgacattgcgccaaggctgatataagcagcgttggacgctagttggcttcggaggcgcggatgaaagtgattggcctcgcgggatggagcggcgccggcaagaccaccctgctgtcgcgggtggtcccctatttgctgggccggaccttgcgcgtctccgtgatcaagcacgcccatcacgaattcgatgtcgacgtgcccggcaaggactcctgggtgcaccggcaggccggcgcgaccgaggtgctggtgtcctcgacgcggcgctgggcgctgatgcatgagctgcgcggcgcgagcgagccgcggctgccggaactgctcgccaagatggcgcaggtcgacctggtcgtggtcgaaggcttcaagcgcgagccggtcagcaagatcgaggtgtatcgggccgccaacggcaagccgttgctgtttccggacgacccgcacgtggtcgggatcgccagcgatgtcgcgatcgagaccaggctgccggtcgtgcatctcgacgacatcgaggacgtcgccgaattgatgctgcgctccgcgattccggtcgacgatgtgctcgcttcggcctcggcggaaagctgagcagggtgggaaaggtgccgccgttgacgatgcgtggcggcttcgccatggtcgggccatgacaacgacgaaactcgatctcaccggcctgaaatgcccgctgcccgcgctgaagacgcgcaaggccctcaggggcgtggcggcaggaaatttccttgaagtgcactgcaccgatccgctttcggtgatcgacatcccggcgctgatccaggcgaccggcgacaaggtcgagatcaccgaacgcagcgaagtccggatcgttttcctgatcgagaagctgaatggtacgatagatatttcaaatgctgcagcgccgcgtacgcgctagatgcagcttgatatctaccatttgcctatcgactcctattttccattctgcgcgaattgataatctccggatggttgcggagatggcggtgtgcccggatgcgggacgccggcggacaacggccggcctgcgtccagatcaggctgcacggcttggcatatccgatcgggttgggggttagcattttcggaatgcgcgtggttggtcccggcgcatcgaggaaatgtgcggcgcggctgcctgacggtggccgcaagtgctgagacgggatcgaagacgcagatgcgcctgacgtaacggcggctgcaggggaggtatcaatgaccgcagtgagcagcgccggacgcgtgtccgcggcaggcgcaggtttcctcgacaaggaacacacgatcgcgaccgcaggcttcaatcgctggctggtgccgccggccgcgctgtgcatccatctctgcatcggtatggcgtacggcttctcggtgttctggctgccgctgtcgcgcgcgatcggcctgaccgcgccgaaagcgtgccctgacatgtcgctgatgcaggaattgttcacgacgacctgcgactggaaggtcgcgagcctcggctggatgtacaccctgttcttcgtgctgctcggcgtctccgccgcgatctggggcggctggctcgagaaggccggtccgcgcaaggcgggcttcgtcgcggcgttgtgctgggctggcggtctcgtgatcggcgcgctcggcgtctacacgcaccagctttggctgatgtggctcggctccggcgtgatcggcggggtcggtctcggcctcggctacatctcgccggtgtcgacgctggtgaaatggttccccgaccgccgcggcatggcgaccggcatggctatcatgggctttggcggtggcgcgatgatcggcgcgccgctcgcggacaagttgatgaattatttcaagaccccgacctcggtcggtgtctgggaaaccttcctcagcatgggcgcgatctatttcgtgttcatgatgatcggcgcattccgctatcgcctgccgccgagcggatggcagcccgagggctggacgccgccgaccaaggccaacgcgatgatctcgaccaagaacgtgcatctcgacaacgcgcacaagacgccgcagttctggctgatctggggggtgctgtgcctgaacgtgtcggcgggcatcggcgtgatcgggatggcctcaccgatgctgcaggagatcttcgccggcaagctgatcgggctgcccgacgtcggcttcaatgcgctcgatgcgtcgcagaaggcgcagatcgcggcgattgccgcgggtttcgccggcctgctgtcgctgttcaacatcggtggccgtttcttctgggcttcgctgtcggacaagatcggccgcaagaacacttactacacgttcttcgtgctcggcatcgtgctctacgcgctggcgccgacctttgccgcgatgggctcgaagcttctgttcgtgctcggcttcggcatcatcctgtcgatgtatggcggcggctttgccaccgtgccggcctatcttgccgacatgttcggcacccagttcgtcggcgcgattcatggccgcctgctgacggcatggtcgaccgcgggcatcatcggtccggtggtggtgaactatctgcgtgagttccagctggccgcgggcgtgccgcgcgaccagctctacaacaccacgatgtacatcctgtgcgccatgctgatcgccggcttcatctgcaactacatgatcaagccggtcgatccgaagtggcacatgagcgacgccgaggtggccaagctgcaggcggcgactgcgaccggcggcaatggtgcgaccggctcgttcggcatcggcaagggcggtctcgacggccgggcggcgctgttctggctgttcgtcggcattcccttggcctggggcatctacatgacgttgctcagcgcggtcaaaatcctctgactgcgaccatcagcgccgcgggttgccggttctccggcacccgcggcgttcgctctattcaacgaacaaacattcaacgaacagacttgggatgggggatttcgatgttttgcaccaggatttgccttgccgccgcgctgctcgccgtgggactccatgtcgcgtcggcccagaccacggcgcccgccgcgccggcaccggccgccacgacggccaagccgtcgaagatgaagctgacgatggacaaactgaaggcgatgaaggcgcagtggcgcgccaacaagcccaagctgaaggcctgccgcgccgaggtgaaggcgaagggcctgaccggcgacgatcgctggttttacatcgaagactgcatgggcaagagctgacccccaccgctctgaatgcgtcgaggatcgagctgagagagcacgccgtgcggcacccctctccctaaccctcccccgcaagggtaggggaatcgcatatggcgatggaggggtgttgccaagcggttggaactggattctttgggtgtctctcgcttcccgagggagaccagaatgcgccaactcaagcgcctgcttcgaccactcaaggacccccgcgccagcaacgtgcggcacgatctggtggagatcatcgtcatcgccttggcggcgacactggccggcgccaagacctgcaccgagttcgagttcttcggcaaaggccgagaggagctgttgcagcggttcctggagctcagatccggcatccccagccacgatacgttcagcaacgtcttccgtgctctggacccgaaggggttggaagcgattttgcgcaagctcagcaagggcttcggcatcaagggcgtggtcagcatcgacggcaaggcgttgcgcggcgccttcatgcgtgggcggcaatccacaccgctgcatatggtcaatgtctgggcggcaggcacacgcatggcgctggctcaaaggaaggcccccaatcgcaacgaggttgccggcgttctcgaagtcctcgcctcgctcgatctggacggcgctcttgtcactgccgacgccttgcattgccggcccgatgtcgcgca

SEQ ID NO: 29 - DNA, 107463 bp, Bradyrhizobium enterica
gcgggccgcgcgcggtcctgccgccccggcgcaagcggccgcgggggagggcggcggcacccgtgccgcactcgccgtgctgtcggcgcagcaggcgctcaaggagatcaacaacacgcccggcggcgtcgcgctggtgccggccgaggcctatcgcaactccaccgtggccaacacgatcaaggacatcctcgattatgtccctggcgtgttcgcgcagccgaaatggggcgacgatacgcggctgtcgatccgcggctccggcctgtcgcgcaatttccatctgcgcggcatccagctctacatggacggcattccgatcaacacttcggacggctacggcgatttccaggaggtcgacccgaccgcctataaatatgtcgaggtctacaagggcggcaacgcgctgcagttcggcgccaattcactcggcggcgcgatcaatttcgtcacgccgaccgggcgcgatccgaatccgaacggcgcatcgttcgacttcggcgccttcaacaccaggcggctgcaggtcaatgccggcggcgcgaacgggccgtgggatggcttcgccaccgcgtccacgcaggcctccgacggcttccgcgatcacagtttcggctcgagcaacaagctcagcgccaatgtcggctaccagatctcgcccgacgtcgagacgaggttttacctgaacgccaacgaggtgcgccagcgcatcccgggcagcgtcgaccggacgacggcgctgacgtcaccgaccacggcggccgccgtcaatgtcgccaatgattggcagcgcaacatcgacacggtgcggatcgccaacaagacgactatccgcctcgacgacacccagctcgaattcggagccttcggcgtcgaccggcatttgatgcatccgatcttccagtggctcgactatcgctacaaggactatggcggcttcgcgaagctgaccgacgatcgcgtcatcggcggcttccacaaccggttgatcgccggcgtcaacatcctcaacggcaccatcgatgcccagcaattcgtcaatgtcggcggcttcaagggcgcgcagacgtcgtcattgcggcagacgccggagaactattcggcattcgcggagaattcgttctacttcctgcccaacgtcgccttcgtcgccggtacgcaatacctgttcgcggtgcgcgaccagcacgtcaacttctcgaccaatggcgacctcaacggccgcagcagtttcagcctgtggagccccaagaccggcctgctctggcaggtcgatccgagctggcaggtgttcggcaacgtctcgcgcagcgcggaggtaccgagcttcggcgagagcgtcagcccgaatttcctcaatccgtccctgccgaacatcccgttcttttcgatcaagccgcagaccgcgacgacctatgaggtcggcacccgcatgaagcggccggactacgcctgggaggtcacgctctatcgctccgagatcgacaacgagctgctgtgtctctacagcgcgttcggcaattgcaacgtcaccaacgccaacaagacggtgcaccaggggatcgaggccggcgcgggcgcggcgattttccgcgacatcttcgtgagcggagcggcgccggacaagatctggctcaacatcgcctatacgctgaacgatttccgcttcgacaatgatccggtgttcggcaacaaccagctgccgggcgcgccgcgccaattcgtgcgggccgagctgctctacaagcatccgaccgggctttatgccggacccaatctggaatgggtgccgcaggcctatttcgtcgacagcgccaacacgctgatgacgtcggcttacgcgatctggggcttcaaggcgggattcgacaatggcggtccggtgtcgggctatgtcgaggcacgcaatatcgccaacaaggcctatatcgcgagcgccagcatcatcgaccgtgccaatgcggcgtcaccgctgttcgagccgggaacgggcagggcgttctatgccgggctgcgctatcgatggtgagaggacgccgatcggcatccgtcggagaccttgcatgtaaaaggcccgctccggggctcgcatttcggagcgggccagtctgggcgcggcaaagcgttgccgcggcgcgaacctagcgcggcatgctgacaccaccctgacggcggtcaaaaagccgcggtgaaaccagagaggcgactgaacgccgcctccctggctcgatgatggttttgtgaacggaacgccttgcggcgtgctcaccatttgtaggcgaggctcgccgtaatgcgccggcgatcaccgtagtagcaggagccgatcgtggcgcagcttgcgacgtagatcttgtcggtgacgttcacgacattgagcgcggcgcgccaattgttgtcccattcatagtgcagagcgaggtcgccgagcacgacccccggaacgcgcgcggtgttcgcggtatcggcgaacgatgagccgacatagcgcacgccgccgccgaagccgaagccggtgagcgggccctcgcggaaggtgtagtcggtccagaccgaggcgagctcccgcggcgcgttggtgggcacggtgccgatcagcgcgggattgagatccttgctgacgaacagctcgtaattggtgtagctcgccaccagcttgaaatcgcgcgtgatgttggcgaccgcctcgagctcgacaccgcgcgaggtgacctcgccgttctgggtctggaacagcgtattgttcgggtccgtcgtcagggcgttcttgcgcttgagatcgaaataagcgacgccaaaccgcgcattgagtccgaccggctcgtacttcacgccgatttcggtctgctcggaggtttccggcagcagcaattggccggcggccgtggtgccgatcaccggattgtagccggtcatgtaggagacgtagggcgcgacgccgctgtcgaaattgtagatcgcgccgacgcgtccggagaacttgctgtcgtcgcgggcctgatcggcgccgatccggttgttgttggtgagatcgacaaagtcctggcgacccgacagcacgacggtgaggcggtcgagcttgacctgatcctgcagatagagcccggccatgccctgggtgagataggcgttctgatacagcgcgccggtgaatggcgtgttgttgccgtagaccggattgagcgcgttgaggttggtgcccatgccgaagccctggcgatcgtcgatgccgtaatatttcaggtcgacgccgaccagcgcggtgtgctgcagcgcgccggtcgcgaagcgatattcgagctgattgtcgaggttgagctgggtggcgatgccgcgggtgtagaaattgccgcgcatgatgtcggccgcagcaggcgtcgtcgcatagccgagcccgtagaggccggcatagtagacatcgacatgagccatgcgcgcgttctggcggaagtcgatgttgtcggtcacgctcttctggaactggtagccgaccatctgctggtcgcggcggaactggtcgacaccgggatcgccggagaacaggctggtcggaattttgccgaacggcgcgttggtgacggtgccgacatagggcaggaagttctcggccctcgtattgctgtgcgaggccatgccgaacacggtgaggctggtgtcggcgtcgggccgccaggtcaccgacggggcgaagaagaaattgttgtcgtagacgtagtcggtctgggtgccgccgccctgggcttggccgaccaggcgatactgcacctgcccgccgccgggctgtgccgtcgcgccgccgatgtcgaactgggtataggcgttgccgaaattattgacgccggtctcgatgtagcgaatgggctcggctgacggcagcttgctcaccgcgttgacgagcccgcccggcgccgagccgccatacaggataccggagggaccgcgcagcacctcgacgcgctcgaggttgaagggttgcagcttccagctggcataggaggtgtagaacatctgcaggccgtcaaggaacagcgactcgttctgcgcggggaagccgcggatcatgaaccagtcgttgcggaaatcggcgccataggtgccgccgatcacgcccggcgtgtagcgcagcacctcatcgaacttgccgacgatcttctggtcgcggatctgttcggcgctgatcactgtcaccgattgcggggtctggacgatcggcgtgctggtcttggtgccggttgaactctgtcgtgccagatagccggtgaccggaccgttggcgcgctcgtgtccggcccctccgccggcagctggctgcgcggcttgtggctgtgctcccactggcgcggtcgtggcgcggcgcgcggcgctccgcgcgcgggtggtccgctgcgaaggctgctgcgatcgcgccgcttgccggtgcgggggcgcatcgaccgtcacggacggcaattgcgtctgcgcaaagacctcgtccgcactggcaaccgaaagcatcaccaaagccgaagcagcaaaccgctgcggccgaatccatccgtccgtcattcaacgcccccgaagagaattttctccggcgtcgttatcacggtgattttcgcaaacagcccgcgcgcgcttagaagctatcgaagccgtgcgtaaagcgcgcgggtgtgactgagcgacaacggagtacgacgggcaattgcacgcgtcgcgtgagacgtttgaatcgatcaagtgtcgaacgattcaagaatcgaacgattcaaaattcgtggcgcgtgtcgtcgtctcgtgactcgatacatcgcgattgaacgcgcgacgatcgagagcgtcgcaagttgcgcgattctgttctcgcgaagtgcggggcaacgaatgcctccagcctcgcccatgtgtgatcgggaaggggccggtcacggtccattcgacggtcgcggcttgccgcgccagccggctggaaccgggaccggcggcgaccgggatcgggacgaccgggccgggcgccgggaggagtcgcaatccccgccatccccaccatatctggcataattgaccgccggggaccgcaagcgcttggccattttggggtgatgtgataaccctctgagaccagcttcgaccgccactcgtgaccgtccgcacccaaagtaaaggcttgcggcgttggagatatttcgccgatgacctcatcctccaagaccgcttccgcgcccgattccttcttcacggcgacccttgccgaggccgatcccgagatcgccgccgcgatcaagggcgagctcggccggcagcgccatgagatcgagctgatcgcctccgagaacatcgtcagccgcgccgtgctggaggcgcagggctcggtgatgaccaacaaatacgcggaaggttatccgggcgcgcggtactatggcggttgcgagtgggtcgacgtcgcggagaacctcgcgatcgagcgcgccaagaagctgttcggcgccggctttgccaacgtgcagccgaactccggcagccagatgaaccaggcggtgtttctggcgctgctgcagccgggcgacaccttcatgggtctcgacctcgccgccggcggccatctcacccacggctcgccggtcaatatgtccggcaaatggttcaaggccgcgcactacactgtgcgccgcgaggaccagatcatcgacatggacgaagtccagaagcaggccgagcaggtcaagccgaagctgatcgtcgccggcggctcggcctattcgcgtgcctgggacttcaagcgcttccgcgagatcgccgactcggtcggcgcgtatctcctggtcgacatggcgcatttcgcaggcctcgtcgccggcggcgtgcatgcctcgccggtgccgcacgcccacgtcaccaccaccacgacgcacaagtcgctgcgtggtccgcgcggcggcctgatcctcaccaatgacgagacgctcgccaagaagctgaactcggcgatcttcccgggtctgcagggcggcccgctgatgcacgtgatcgcggccaaggcggtggcgttcgccgaggcgctgcggcccgacttcaaggtctacgccaagaacgtggtcgagaacgccaaggcgctggccgagacgctgcgcagccacggcctcgacatcgtctccggcggcaccgacaaccatctgatgctggtcgacctccggccgaaggggttgaagggcaacatctccgagaaggcgctggtgcgcgccgccatcacttgcaacaagaacggcatcccgttcgatcccgaaaagccgttcgtgacctcgggcctgcgtctcggtacgccggccgcgaccacccgcggcttcggcgttgccgagttcaagcaggtcggcggcatgatcgccgaagtgctgaacgcgctggcgcaatcgccggacggcaaggcgccgctggtcgaggccgcgatcaaggagcgcgtcaaggcgctgaccgatcgcttcccgatctaccagtaagtaaaggagcgcatgatccggaaaagtggataccggttttccgaatagatcatgcgcaaataaaggtcccgtcggatgcgctgcccgagctgcaattctctcgatacgcaggtcaaggactcgcgtccgaccgaggactccgctgtgatccgcaggcggcgcgtgtgcatggcctgcaacttccgcttcacgactttcgagcgggtgcagctgcgcgagctcacggtgatcaagcgcaacggccgccgcgtgccgttcgaccgcgacaagctggtgcgctcgctgcagatctcgctgcgcaagcgcccggtggagtccgagcgggtggagaagatggtgtccaccatcgtccgcgagctcgaaagcggcggcgaggccgaggtctcttcggaggcgatcggcgagatcgtgatggagcatctgcgccagctcgacgacgttgcctatgtgcgcttcgcctcggtctatcgcaatttccgcgaggccaaggacttcgaggcggtgctcgacgagctgaccggcgaagaggatccgcggctcgcaacgttgcgaaaatgatctttcgcattctcgaagaccagttcgcgcagaaatccaaggaggccaaagccgccgatctgcgcttcatgcagcttgcgctggcgctcggccgccgcgggctcgggcgcacctggcccaatccggcggtcggcgccgtgatcgtcaaggatggcgtcatcgtcggtcgcggctggacccagccgggtggccggccgcatgccgaggtcgaggcgctgcggcgcgccggcgacgctgcccgtggcgccacgctctatgtcacgctagaaccctgctcgcatttcggccgttcgccgccctgtgcggatgccgtggtcgcagccgggcttgcccgcgtggtgtcggcgatcgaggaccccaatccggacgtcggtggcaagggacatgcgaagctgcgcgcagccggcatcgcggtcgatgtcgggctgtgcgcggcggaggccgcgcgcgaccacgccggacacttccgccgcatcaccgacaagcgcccgcatgtgatcctcaagctcgcggtgtccgccgacgacaagatcgcggcgctcggtcacaggccggttgcaatcacgggcgaggccgtgcggacccgcgtgcatctgttgcgcgcgcagtgtgacgcgatcctggtcggcatcggcacggtgcaggccgacgatccgctcttgacctgcaggttgccgggcatggcggcgcgctcgccgatccgcgtggtgctggatcgcgcgctacggatctcgggcgacagccgaatggtgcattccgcgcgcgagacgccgctctgggtgatgacatcagacctggcggaggcgcctgccgcggtgaagctcggcgccgcgggtgcgcaggttatccgcgttgccaccggtgcgccggcggggctcgatctgcctgccgtcctgcatgcgctggcggagagggggatcacgcggctcctggtcgagggcgggtctcgcgtggcaaattctttcgtggcagcgggccttgtcgatgaaatctggctgttgcgcggacccgatgcgatcggcgccgacggcgttcccgcgctggacgcaatgccgctcgccgcaatcacgcagtcgcccgctttccggcttcgtgctagcgaaaccctcggcaaagacagtctcaatatctacgagcgtgcgtaatgtttaccggaattgtcaccgacatcggtgagatcgttagcctgaagcccgtggcgcaggggcagctgcatcggttgcggatcgcctgcgactacgaccagaccacgatcgccgacggcgcctcgatcgcctgcaacggcgtctgcctcacggtggtcgcctccggcacgtcagacggcaagacctggttcgacgtcgatgccgcggccgagacgctcggcatgaccaccgccaggcattgggggcagggcggcaagctcaacctcgagcgtgcgctcaagatcggggacgaactcggcggtcacatcgtggccgggcatgccgacggcattgccaccatcgtcaagcgcgacgacctgcccgacatggcgcgcttcgagcttcgcaccacccgcgagctcgcgcgcttcatcgcggcgaagggctcggtcacgctggacggcgtgtcgctgaccgtgaacacggtcgacgacgtcactttttcggtgctgatcatcccgcatacgctgtccgtcacgacgcttagcggctggaaggccggtagcgaggtcaatatcgaggtcgacctgatggcccgctacgccgcgcggctgtcggagatgaaatagcctcgatccgacattgcggccgagacggacgtcattatgtgccaattcggctccggcgactgccggctggatggcctatgcattgcgggcgaagccgacctgaaaaatcgccccgatcgcggtgccatccaggccagtattgcccttggctttaccgcctgctgcgcctaaaacgctgcacaaatcctccccaagttccgattggttattgcaatggctgacgcgcggcgcgcacccctgaaggaccagaccgacatcacaggcgcacgcgtgctgatcgtcgaggcccggttttacgacgacatccaggatgcgctgctggaaggcgcgctggccgagctgaaggcggccggcgccggccacgacgtcatcacggtgccgggcgcgctggaaattccggcggcgatcgcgatcgcgatcgatgccgctgaagcgaacggcaagccctatgacgcggcgatcgcgctcggctgcgtggtgcgcggcgacaccattcatttcgagatcgtctcgatggagtcctcgcgcggattgatggatctggccgtcagccggaaattcccgctcggcaacggcatcatcaccgtcaacaccgaggcccaggcctgggcgcgggcgcgcgccagcgagttgaacaagggcggcgacgcggctcgcgccgcgatcgcgatgctgcggatcaaacgccgtctggcaaaggcctgaccatggctgacagcaacaaacccggcaaagcccctgaaagaaaggccaaccggcgcggcgcggcgcggctcgccgccgtgcaggcgctctaccagatggacatcggcggcgccgggatcaacgacatcttcgccgagttcgagagccactggctcggcaacgaggtcgagggcgacaaatacctgccggcggaagctgcgttctttcgcgacgtcgtctccggcgtggtgcgtgaccaggctaagctcgatccgctgatcgacgaggcgctctcgaagggttggccgctgaagcggatcgacgcgatcctgcgcgcggtgctgcgggcaggatcctacgagctcgagcatcgcaaggacgtgccgggccgcgtggtggtttccgaatatgtcgacgtcgcgcatgcctttgtcgagaaggacgagaccggcatggtcaacgccgtgctcgaccagatcgcgcgccagttccgcggcgacgagtttgtgcggggctgaaccacgtattccgccgtcatcacccgcgaatgcgggcgatccagtacgccgcggcggtcattggcaacaactgctgccgcggcgtaccggatcccccggtcaagccgggcgatgacagctgagggtaaggcgcacgacatggcagagcgtcacgacggcccctccggcgaagactccctgattgcgcgctatttcaagccgctggcgaccgatccgggtgcgttcggcctcgacgacgacgccgccgcgctgagggcggccggcgaggacatcgtggtcaccacggatgccatcgtcgagggcgtgcatttcctccccgatgatccgcccgacacgctggcgcgcaaggcgctgcgggtgaacctgtccgacatcgcggccaagggggctgtgcccgccggcttcgtgctgacgctggccgtgcgcaaggtcgatgaggcctggctgaagccgttcgcgcgggcgcttggcgaggacgctgccgattttggctgtccgctgcttggcggcgatacggtttccacgccggggccgctgatgatctcgatcaccgcgttcggccggctgccgcagggcacgatggtgcatcgcgcgggcgcgcaggcgggcgaccgcgtgttcgtcaccggcacgatcggcgacgccgcgctgggtctcgatgtgcttcagggaggtccggtcgcggcggcgttggccgacgatgccgccgggcgggattttcttgccgcccgctaccgggttccgcagccgcgcaacgcgcttgctcgtgccgtccgtgcccacgccagcgccgcgatggacgtgtccgacggtctcgccggcgatctggccaagctttgcgcagccagcggtgtgacggccgtgatcaacgtgccgagcgtcccgttgtcatctgcggccgcggggctgctcgcacgcaaggcaatcgggatcgagaccctgatcgccggcggcgacgactacgaacttttgtgcgcggtcccgagcgatcgcgcagatgctttcctgcgagaggcgcgccaggccaaggtcacggtgaccgccatcggcggcctgattgccggttcgtcaccaccgagcttcctcgacgggcagggcagggaactgaagttgcagcggctgtcctacagccatttctagaattctcggccggacggcgccgattttccttccaaatagctgcccatatcggccttttcggccacaggtagcgttgcacagcggtaacgattttggcaaggtcgtgcccgatttgaggcaatccgttttggggagggttgtcctcgcaaaataagcgcctgccgcgccctagcggcacaaataggcgcgggggttacatcaaggatctgaggcaacattcaatgacagctttatggttgattgtgctctgcggggcgctttccatcgtctacgcgatctgggcgacccagtcggtcctgaacgcggatgcgggcaatgcccgcatgcaggaaatcgcgggcgcggtgcgcgagggcgcacaagcctatctgcggcggcagtacaccacgatcggcttggtcggtatcgtgatcttcgtgctgctggcctacttcctcggcctgctggtggccctcggatttgcgatcggtgcaatcctgtcgggcgcggccggcttcatcggcatgaacgtttcggtgcgtgccaacgtccgcaccgcgcaggcggcgaccacctcgctcgccggcggcctcgaactcgccttcaaggcgggcgcgatcaccggcctgctggtcgctggtctcgcgctgctcggcgtcacgatctacttcatggtgctggtcaagttccttgggctcgaagccggcagccgcaccgtggtcgacgccatggtggcgctcggcttcggcgcctcgctgatctcgatctttgcccgtctcggcggcggcatcttcaccaagggtgctgatgtcggcggcgacctcgtcggcaaggtcgaggccggcatccccgaagacgatccgcgcaacccggccaccatcgccgacaacgtcggcgataatgtcggcgactgcgccggcatggcggcggacctgttcgagacctatgcggtgaccgcggtcgccaccatggtgctcgcggcgatcttcttcgccaagacgccgatcctggtgaacatgatgacgctgccgctcgcgatcggcggcatctgcatcatcacctcgatcatcggcaccttcttcgtcaagctcggcgccagccagtcgatcatgggagccctctacaagggcctgatcgccaccggcgtcctgtcgctgatcggcgttgccgccgtcatcaactggctgatcggcttcggcaagctcgacggcgtcgactacaccggcctttcgctgttctggtgcggcgtggtcggtcttgcggtcaccggcctgatcatctggatcaccgaatactacaccggcactgactaccgcccggtgaagtcgatcgcggcggcctcggtcaccggtcacggcaccaacgtgatccagggcctcgccgtctcgatggaggcgaccgcgctgcccgcgatcgtcatcatcgccggcatcctggtcacctacagcctggccggcctgttcggtatcgcgatcgcgaccgccaccatgctggcgctggccggcatgatcgtcgcgctcgacgccttcggcccggtcaccgacaatgccggcggcatcgccgaaatggcgggtctgccgaaggaggtgcgcaagtcgaccgacgcgctcgacgcggtcggcaacaccaccaaggcggtgaccaagggctacgcgatcggctccgccggtctcggtgcgctggtgctgtttgcggcctataaccaggatctcaaattctttatcagcgactccaacgcccatgcctacttcaagggcgtcaatccggacttctccctgaacaatccgtacgtcgtggtcggcctgctgttcggcggcctgctgccgtatctgttcggtgcgatgggcatgaccgcggtcggccgcgccgccggcgcgatcgtcgaggaggtgcggcgtcagttccgcgagaagcccggcatcatgcagggcaccgacaagccggactacggcaaggcggtcgacctgctgacccgggccgcgatcaaggagatgatcatcccctcgctgttgccggtgctgtcgccgatcgtggtctacttcctgatctatttcatcgcgggtggtggcgcggacggcaagtcggcggcgttctccgcggtcggcgccatgctgctcggcgtcatcgtcaccggtctcttcgtggcgatctcgatgacctcgggcggcggcgcctgggacaacgccaagaagtacatcgaggacggccactacggcggcaagggcagtgatgcccacaagtccgcggtgaccggcgacaccgtcggcgatccctacaaggacacggcgggcccggcggtgaacccgatgatcaagatcaccaacatcgtggcgctgctgctgctggcgatcctcgcgcactgagcggcgacacgaacgaatccaaagccccgcggcgaaagccgcggggtttttgttggaatagccagacgcgaacaacacggagaacaatcgatgtcgctctcatccgcccgcaactatgcgcttcgcgcctccaaatcgcaggatcagacagaggccatcgagctactctcgaaggcgatcatggaactggcgatgtcgattgaagccaccgacgccaaggtgaagaagatcaacaagtcctcgtagcgtcggccgcaccgcgagcccaaatgacggctgcgccgtcacttgacctccatctgcaagccttccttctcgatgatggcggcgaatttcctggtctcggcatcgacgaagtcggagaattgctgcggcgtgccgtagtcggcgcgggcgcccatgccggcgatgttcttcctgacgtcgtcgcgcgccagcatcgccttgatctggcggttcagctcgtcgacgacgggcgcgggtgccgtcttcggcaggaatacgccgaaccaggacgcgacgtcgaatttggcgagctccggcgcgccctcgcgcatgacgggcaggttgggcgcggagtcgctgcggtcggccgtcgtcacgcagagcccgttcagcttgccgtccagcacctgcggcagcgacggatagagattgtcgaacaggatctggatgtcgccggcgagcccggcctgcaatgccgggccggcaccgcggaacggcacatgcgtcatcttcagcccggtcagttgcaggaaccaggcgccggtgaggtgggggctctggccggtgccggacgagccgtaagtcagcttgtccgggtgcttcttcagataggcgatcaattcggggatcgacttgaggccggtcgatggatgcgccgagacgatgttcgggatccggatcatgttggagaccgcctgcaactggtcggccttgtaggtcaggttgcggaagatgccgtaggcgatcgcgttcggaccgggattgccgatcaggatggtatggccgtcgcccttgctgcgcgcaacctccgccgtgccgatggtgccgccggcgcccgagcgattctccacgaccaccgactggccccagagcggctgcaaatgcgccgcgagtagccggcccatcacgtcggtcgatccgccggcggcggccggcacgatgatccggaccgtctcggtcggccgccagtcgccggcccccaggctcgcgcgcggcaggatcgatgcggccgtcaatgcggccgtgcccgacaataccgtacgacgggaaaatctcttggctctcacgcgcttaccccctgctcaggctcttgtttgcgagcaagcctaggggagcgcttgcccgttgggcaagcgacaaactggcgcagttccttacgcgctagttaaagctcagcagcttgaacagcggtgtgaggtaggacatttcctggcccgacgtcggcgtggtccggctgacgaagtcgaagatcttgccgtccttcaggccgtaattggcgagccggcgcacttgccggttcttgtcgaaatagaccgcgatgacgcgctggtcgaccacccgctgattcatgaatgcgaccgggcgcgaggtccgttgcgagatgtaatagaacacctcgccgtccagcgttgcgaccgtcgacggcgtgccgagcacgatcagcacctgatcctggctggcgccgatcggaatctgctcgagcgctccgtcgggcaggatgtagcccttctggaattgctcaccggcacagccgccgagcgcggcgccgcagacgaggccaacgaccgcgagggcgcggaagcgcatgaagaacccgcgcgcggaagccgtgcgagactgtcgtgaaagagtgtggttcatcggcggaactgatccgtccccttgcatcggccggagcattgacgtaccgggcagctcaatggattgcaatcatgccgagctccaacgggcgaaccctcaacaggtgtcctttggggggccggcagccggaacccgtcatgctttggccgttcaatcacttgagaagaccccgggtgcccgcgcggagcaccattgagaccatctatggcatgatcgtgacgcaggcgcgagaaccgttattttaccgtgacttgggcgttccggacacggttaatggccgttttgacctgcttctgatgcacctgtggatggtgttgcgccgactgaaatccgtcgatggcggtgcggagctgtcacaggccctgttcgatcacttctgcatcgacatggacgacaatctcagggaaatgggcgtcggcgacctcacggtgccgaagcggatgcaggcgttcggcgaagcgttctacggtcgcaccgcggcctatgatctggcgctgaccgaccgcgacgaggccctggccgagtcgttctgcaagaacatcctcaacggtcagaatatcgagaaagcccatgaactggccgcctatgcccgggaggcgatggccggattggcgcgcgcggaccgtgcggcgctgatccagggagcgtggcgcttccccgcgccgcaggcggccgggagcgcggcatgagcggcggcaccacagggcggcccgagcgcgatcgcgatccctggcgcgtcctcgtcaacgttgcgcagatccccgacaccggcctgcatcgtgagatcgccgccgacgaggcggcgcgaaaggcgatggccgacgtcgcggagttgcgggaggtcatctcggcgcaggcggagtttgacctgcagcccaagcgcgacggcagctatcacgtcaccggccgggttcaggcccgcatcgggcagacctgcgtggtgacgctcgagccgatcgagaacgagatcgatgagccgatcgatgtggtgttcgcgccgcccgagcagatcccggagatggccgacctggtcgacgacgccgaggagagcggcgaggagacgccggacccgccggagccgatcgtcgggggcttcatcgacatcggccggctcgccaccgacgcgctgttcctcggcatcgacccatatccgcgcaaggtggatgcggtttttgaacaggaggttgaagcgcctgatccggaaaatcatccgttcgccgcgctgagggcgctgaaggagaagcctgacggcaagaagcccaagggcagctaaaggcggccgacgtcacatttgcggggatggcttgctgcagagctgcgcgaacggtgtccgtggccacttcaaataactgtcacaatacattgaaatacaatgtatttctgatatagcttgatgcgtcgtgtgacggttcggccactgcctcgttcgtggtcaagaggttgtgtcggaccgcggacacgctattgtcgcggcccggccgggacgcgagttggcgtttcggcaggcgccgttgacggcggtgacttcaagctcgcggtcttcgtctgaagggctgtgggagagcaggcttccgggacgttcatgcctcataaggttcgaatagcgcttgacgccatggggggcgatgtcggcgcttccgtggtcattcccggcgccgcgatctcattgagccgtcaccccgactgcgaattcctgctggtcggcgaccaggcccagatcgagccggagcttgccagacatcccgcgctgaaggcggtatccaaggtgatccacaccgacgtcgccgtgaagggggacgagaagccgagccaggcgctgcggcggacccgcagggcgtcctcgatgtggcttgcgatcgacgccgtcaagcacggcgaggccgatgtcgcgatctcggccggcaataccggtgcgctgatggcgatgggtaatatcaacctgcggacgctgcccggcgtcgaccgcccggcgctcgccgcggtgtggccgaccttgcgcggcgattccgtcgtgctcgacctcggcgccacgatcggcggcgatgcccaccatctgacgacgctggcggtgatgggcagcgccatggcgagcgtgctgttcaacctggagcggccgactgtcggcctgctcaatatcgggtccgaggagatcaagggccacgaggaaatccgcgaggccgccggcatgctgcgggcgatgaacgcgtcccaattcaactatatcggatttgtcgagggcgacggcatcggcaagggcgccgccgacgtgatcgtgtcggagggcttctgcggcaatatcgcgctcaagaccgccgagggaaccgcgcgccagatgttcgccctgctgcgcgaggccatgtcgtcgagctggctggcgcggattggctatctgctcgcccgcggcgcgttccagaagctgcgcgacaagctcgaccccaacaagtcgaacggcagcatactgctcggcctgaagggcgtggtggtcaagagccatggcggcgtcaacgcagaaggctttgcctacgcggtcgatgttggctatgagatggcccactacgatctcctcaccaagatcaatcagatgctcaatcgcgacggcagcgccctggtgcaggcgcagaccgcgcaggaggctgtctcgtgactgcgatacgttcggtagtgctcggctgcggctcatatttgccggagcgggttttgaccaatgccgaactggctcagcgaatcgacacgtccgatgactggatcgtgcagcgcaccggcatcagcgagcggcacatcgcggccgatgacgagtttacctcgcatcttgcgatcaaggcggcgcaggccgcgctcgccgatgccaaggtcgacgcccagtcgatcgacctgatcgtgctggcgacctcgacgcccgacaacacgttcccggcgaccgcggtcgcggtccagcatgcgctcggcatcaaccatggcgtcgcgttcgatctgcaggcggtgtgctccggcttcgtctttgcgctgaccaccgccgacaatttcctgcgcgccggccatcacaagcgggcgctggtgatcggtgccgaaaccttctcgcgcatcctcgactggagcgaccgcggcacctgcgtgctgttcggcgatggcgccggcgcggtcgtgctggaagcgcagccgcattcaggaacgaccgacgatcccggcgtactgacgacgcatctgcgctcggatggccgccacaagtcgaagctgttcgtcgatggcggtcccggctcgaccaagacggtcggttatctccggatggagggccgcgaggtgttcaagcacgccgtcggcatgatcaccgacgtgatcgtcgatgcgttcaacgccaccggcttcaccgccgatgacatcgcctggttcattccgcaccaggccaacaagcgaatcatcgacgcatccgcccacaagctgcatattgcgccgcagaaggtggtcttgacagtcgacaagcacggcaacacctcggccgcctcgatcccgctggcgctgtcggtcgccgtgaaggacggacgcgtcaagaagggcgatcttgtgctgttcgaggcgatgggcggcggcttcacctggggctcggcgctcgtgcgctggtgagtgcttcgcttaaaagtacggatatttcgtaaggttcttttccagcgtgcatgctggtcgctgttgaccatcgcgcgctaagcttttaatttcagtcaggaaattgttcgccgagagtgcggggcaggcgatgacgacgggaaccggaaaaacagtgacgcgcgtcgatttgtgcgaagcggtctaccaaaaggtaggtctgtcgcgcacggaatcgtcggcgtttgtcgagttggtgctgaaggagatcaccgattgccttgagaagggcgagacggtgaagttgtcctcgttcggctccttcatggtgcgcaagaagggccagcgtatcggccgcaatccaaagaccggcaccgaggtgccgatctcgccgcggcgtgtgatggtgttcaagccgtcggcgatcctgaagcagcggatcaatggccatgccgtcaccaatggcgacggcagcaaggccgattaactggcgttgaagccaagaggagcgggcatttggacaaggcgccggatgcgttccgtaccatcagcgaggtcgctgacgaactcgatatcccgcagcatgtgctgaggttctgggaaacgcgcttcgcgcagatcaagccgatgaagcgcagcggcggacgccgttactatcgccccgacgacgtcgacctgctcaagggcatccgccggctgctgtacggcgaaggctataccatccgcggcgtgcagcggatcctgaaagaacatggcatcaagtcggtgcagggcatcgccgaccaggccgccgcggtctccttcggcgcggtcgaggaggcggtcggcaacagcatggccgagcccgacgacgtcgagagcagcgacggcctcgatttcgacggcgaggagggcgacggcgacgagaagggcatcgactaccgattcgtcgatcccgacgaggatccgatcctgtcgacctacaaggcgcatgcccagccgggcaaggcgtccgcgccgccgccggtgcggccttccgttccgtcagcggatcgggagcggctcgaacgcgtgctgcaggagctggttgcctgccggcagatgatcgatactgcgatgaaggacggctgatccaaggaaacccgggcgggaaccggtgcccggattgctgccttcgaggccctgctttgccttgcgcgaacgcaggatcgcagctaatggaacggcatcggagcgtggcgcagcccggttagcgcactagtctgggagactaggggtcggaggttcaaatcctctcgctccgaccatttttcaaagcattcgagttctcaaaccggcgttgccttcggcccagcgtggcccgccgcctcaggtctcgaaatccatcgctgcgatcaggcacgccttttccaggcgattggtgagcgtcgcaagcttggccgtgaactcggccaattcgggctcgctgaattcctcgaacacggttttcttgaacgccttgtgctgctcggcgaggcccgccagatgcttgcgggtcttgtcggtcagcgacaggcggaccacgcgcgcatcggccggggagggcgcgcgacgcagcaactccttctgctcgagcaactttgactgcgtggtcacgaacgacggatcgacgtgcagcagcttcgacaccacgttgatcggtacgccgacatccttgtcgagatccgagatcgccatcaggatcatccattgcggaccgctgacgccaagcgccttgccccagagttggcggacccgttcaagatgcgaattgatggatgaaatttcgagcgtgaagcgcttgatgatgtcgagatgctcgatggcgcgctgacgcgtcgaatccttcctggtcactgacacagcttccccttccctaggtgccgactcagctttgtgctgatttatttctttgttcccgcgtcggcgcggtattttttctcgtaagtcgctcaggaacgcaagtgaacgtaaagcaattatgatgcgtatgtgacggttcggttttttgggtgcgacaattttgcccacacatacaaggggcttacggcgagcgttgccgacgagacacagtgtggccgcattcgcattcctgactttataaactattttgattggcgaactcgcgcatgcatattgaacccggcggtaggggaatctcgatcgtcccgttgcggtgatcgttcaagtccgccgcactcccagagattgatctgcgggtgcggggtttggggaaaacggtcttggacaatgcgggaggatcacggggcgctcgcgacccggactctacgcatatgagcaacttggaggtttgatatgacattggcgaagagccttattctgggctcggccgccgcgctggtcgcggtcggcggggcacaggcggccgatcttcccgttaaggccaaagcggtcgagtacgtgaaggtctgctctctttatggtccgggcttctactacatccccggcaccgacacctgcatcaagctgggcggcttcgtccgcgctgacctcgtggtcaacggcaacggcgtgtacggtccgaataccaacggcgccagcggagccaacaaccgtttcaccaacggctacacctggcgttcgcgtgaagacctgaacatcgatacgcgcaccgcgaccgagtacggcgtggtccgcacctatttcgatgcggtgttcacctggacctcggacagctacgcggccaacggcgccggcggcaccgtctactcgggcctcggttccggcgcggcgacggtcagcgctccgaacaacgccaactccggtgcggttgcggctggtacggtcggcgtctactacgccttcatccagttcgccggcttcaccattggtaagtccgtctcgcagttcgctgcgccctggactgcctatccgggcaacaactacgacgccctcgtcggtggcatcaacaccaccaacggcgtcaaccagttcacctacaccgcgcagttcggcaacggcgtctcgctcgctctgtcggcgcaggatcaggttgcctacacgcaggctggcgtgaacaacctcggtgctggtggtgcgtacggcgcgagcgactatgccggcacgatcacgccggacttcatcgctgcgctcaaggtcgaccaggcctggggtatcttccaggcgtcgatcgcagcccatgacaaccacgcagcctactacggcgccaccgaagtcaccggccatcccgacgacaagtggggctgggctggtgcactggccctgtcgatcaagaacatcccgaccggacctggtgacaccatcaacatccagggcgtctacaccgacggcgcgacccgttacaacatccaggatctggccggcggcatcagctcggccgtcatctatggcggctcaaacctgccgggcgcttacggcagcgttggcttcggcacggcacccgacacggtgttcggccccggcggtcagcagcagtcgatcaagacctggggcttccgcggtgcgtacacccacaactgggatccctactggaacaccagcttgtacggtgcatacgctgcggtcatgtacaacgacacggctaagtcgctcatctgcggcgttggtggcgtcggtggcacgttccgcgctgccttcgctggcggcgctggtgtgaccagctgcaaccccgactacaacatcggtcagctcggcctgatcactcgttggactccggtcaagaacctgaccttctcggccgacgtgacctacgtccatctcgatcagaagtatgccggcacgatcaccacgtcggctggtgcgatcggcaagccggtcgcgacctacgagctgaagaatcaggacactgtccagatgctcttccgcgctcagcgtaactggtaataccggttgatctgatcaggatctgacagaaccccggcaggcaactgccggggtttttctttgagtgaaagctctcgcgatggacgagagcgttctcaagcaagtggataccggtccgcgtgaagaaagcgcgtcaaaagggctttggctgcgtcatttctgtccacgcgaacaacgaagacgagccatgcgattcattcgccgcaaacttatttacttagctgatctactaaactatatacggagtagccaacacattgaatgatggctcttagcgtcatgctaagcctcccaaacctccggcaatgccctgccggaggtttttgattcggtgcggtcaagatttgacggaatcgatccgcagtgcattctcgtcgttcatgggacgctttaagaacagccgcctggcgcgcatgagcagcggccactattgcctgatacgggatctcgggctggtgaagggcggcaagggattgcggcaccatgaggtggtcatcgacttctcgtggcgcggcctgctcaagctggccgtgagcgccggcaccgctgtgctgcggcggcgcgcgccggtgcggatcgaaacagccgaatagcgcgggaggatctcgagttgagccgatcaaccgcaacgccgcgcgtttcgcaatagtccaacagcgatcgtcatcagcgttgtcacgaccgatcgggccacgacatgcacgatcattgtatccgcttgtcgatgtcagattgttcgcaacgcggaatgatttcatgacgcgcccctctgcttcaatctgatccgcacggctcaactgcgcgtgaggggcgcgcgccgttgctggacgataattcggtgatgtacagtgtttccgtcagatggttgggactgcgatccgcgctccagccgaaaccaagaaaaagcagggaaggaacggatcccacatgaaggattttgccggaaagattgccgtcatcaccggtggcggcacgggcatgggacgcgagctcgcacggcaactcgtcgcagagggatgcaatgtcgcgatgtgcgacgtctcgatggaggcgatggcggagaccaagcggctctgcgaggtcgagaagctgccgcaggggctgcgtatcaccacccacgtcgccgacgtctcgatcgaggatcactacaagcgcttccgcgacgagctggtcgagcagcaggcgaccgacaagatccatctgctgttcaacaacgccggaatcggtggcggcggcagcctgttcaccaacacgcgcgaacagtgggagcgcaccttcaacatctgctggggcggcgtctatctcggtgtccgcaccttcctgccattgctggtgaaggccgacgaggcacacatcgtcaacacctcgagcgtcaacggcttctgggcctcggtcgggctcggcgtctcccacaccgcctacagcgccgcgaaattcgccgtgaagggattcacggaggcgatgatcaacgatctccgcctcaacgcgccgcatgtcaaatgctcggtcgtgatgcccggtcacatcggcacctcgatcgtgtcgaactcgcgcaaggtacagaacggctcagatcagctcaatcccgacgagctcaagcaggcgcgtcagcgtctgcaagggcagggcatcgacgtcgccaagatgtcggatgccgatatccagcaactcgcgctcgaccgtgcccgcatcttccacgacgaggcgccgaccacggcggccgccgccgccaagatcatcctcgacggcgtcaaggccgatcgctggcgtatcctggtcggcgacgatgcgcatatgctcgacgagcgcgtgcgcaagacgccggagcaggcatacacgccggagttttatcaggacctcgtagcggcgaccggctggaaggtcggctgattggactgaggcccgtcacccccgcgaaaaggcaaagcctttgcgcggggatcacgggggcagcgcttgcttgttgccatcaactaccgcgcatcgcgcgttggcgcgatccggactgataggcgaggcggtaatgccctgggcaatagggcatcccgccgagcggagtgttgccgcagaagcagaaatcatcggcgcccgggctgctgatcggccagcggcagcgctgctcgctcaattcgaacagcgaacagttgttgacgctgacaacaggcgcatcgtagggctccgtctcgtagaccgcctgaagcagctggagttgctgcttcgcggtcgcccgttgcgcggcgtggacggcggatttctttcgccgtgcccggcgttcctccggcgtcgtgcgcgtcaggttcagccgcgacagcttgccgatgacagcattgcggctaacgccgatattgacggcgatgtcgcggcaggagaggccggcttcaaagtagatcttgagttggtcgacgcgctctggcgtccaggtctcttggttgacaatcatctgacggttccacgttctgtgttgaaccgccgcgcggacgcgtgcgccgtcagggcgtgcgtccgttgtcgcggattgcaagcaacccgtccttgatggcgagccgaatgccttcctcgatcaatgtccgtgcaacgcccgggacgctcgtgccgtgggtgccctgtctcaccagcttctcgagataaccaatggtcgagagtgccagtgtgaccgggacgcggtcggtttcggccttttccgtagccatgagaaaacgcttaaccctgaacgcctgtactgaaaagtatctatttagagtctatttagaaatgaggcagttcgtcaagcgccggtcgcaaaatgcgaacagccgcgccggaggcggattccggcacggcgtcacgatcagattacttagctatatgaatgagttaggtgcgtagctcgaccttgaccgggaacgtcttcagaagccgctcggcggtttcggccttgtccgcaggcgcgctcacgctgaggtacagcccgcgggacgggtcggtgatggcctcgacgctgacctcgtcggacaatccttcccgcgccagcagctcgcgcgcggcctcgccggcggcgatctcgcgcagcttgggcttgaagatcttgccgaccggcgtgaccggcatctccgcaatcaccgacaccacgcgcggacgggcgggcggctccaggatgttgtcctgcacgaacgcggcgagcgcctgcggatcgatctgcgcgccgggctgggccgagacgaacagcatcggcacttcgccggcatagctgtcgggacggccgacggccgcggccagcgccacgcccggaaacgccagcgcggcgtcctcgatcgcacgcggatcgatgttgtggccgccgcggatgatgacgtccttggcgcggcccatgatgtagacgaagccgtcggcatcgatccggcagatgtcgccggtgcgcagccagccgtcacggaatgcttcttcggtctgcttctcgtcgacgtaaccggcgaacacctgcgggccccgggtcaagagctcgccgaccggcgagggccacggcccggtgtgaagcttgccgccctcgaggatcgcaagctcgaccaacggattgcgggtgccgacgctctcggcgcgcggcctcacgccgtgcacgtcgtgagtgatggcgccggcgagctcggtcatgccgtagagctgctggatgcagtcgccgccccaggtcgcgagatagcgccgctcgatctccggcgggcagatcgaggcgccggtggcggtgacgcgcaggctcgaaatgtcgctgtcggcgaccgggatgtcggcgagcgcgccgagcgtggtcggcacgttgccggcgatgttgacgcggtatgtctcgatgattttccagaaatgggtgatcagcgccggatcgcgcgccccggcgggacccgggatgaacatcgtcgtgccggcggcaaggcaattggcggtcgtgcagaacaagccgccgacatggaacagcggcaatgtgatcatcgcacgctcgccgcggtggaaatcgagcgccatgcgcgaggagacggtggaggcgaccatcgcgcgattggtcagccgcgccaccttgggatggcctgtcgtgccgccggtcggcagcatcactgcgacgcggtcggcctcgctcatgtccctcgacttgccgtagtcgtcgcgccaggccggatccggccgcagcacctcgccgtcgaacgcgatactgccgtcgagcggcacaaccacgatgcgccggagcgacggcacctcgcgctgcaggccctcgaccctttcatacaggccgcccggcattcccggtggcggcgccagcaacaattttgcgttgatcgcattgagctgggccgtgatcgcttcccgcgtgaacagcaggttgagcggttcggcgacgccgcaggcggctgcgccgaagatcgcgaccacggtcgcaggacatgccggcagcaggatcgcgaccgcatcgttcttgccgataccctccgcgcggaagtagttttcggccgccttgacgtagcccatcagctgatcgttcgagatcacgaccgggttgggatcgagcggcgagcgcagatagatcgcggcttcggcgtccggcgcgccctgcgggccgcgggcgatgagatcgaggatccgcgggcaggcggcgagcgtctcccgcatctccttgtcgcgcgcagcttcgtcggccggcgaaagcctgtccttcagcatatccgtccccgtccattcttgttcgttgggagggggattgtatcgagccgcacgcgcggaacacaagtgcggctatcgaccgcgtgtcagccgtggacgaccgatttggcgatcatgcagtgaatgcccttggagccgttgaccgtctgggtcacccgcaggtcggcggccaggctgcacagcgtgtaggcgtcttcgcgcgacagatttcgcttctcgccgagcagcacgatcatgtcgcgcagcgcccgcaccacgcactggtcgagatcgggatccatcgccatggtcatgtaatggtccgatgtctcggcgcgcggataggcgagcttgaggtccttgcgcagggtgaggcggaagcggccggtgagagcggtttcgatcgcggtgacgcagacctcgccgtcgccctgcacgccatggccgtcgccgcaggagaacagcgcgcccggcacgaacacgggcagatagagcttggcgccggcccctagctccttgttgtcgagattgccgcccatcgcgcgcgggatgagcgaggagatgcggccccaggccggcggcggcgagacacccatcacaccgaagaacggcttcagcggcaggtcgagcccccagggcatgcggccgaccatccgcgcacgatcgagcgggatgttgaggacgcgggtctcgtggaagtcgtccggcagcgtgccggacagcggcttgatcagattgtagccccaatcctgccgaagctggacgtcgaggatatcgacctcgagcacgtcgccgggctcggcgccggccaccgcgatcggaccggtcaggatgtgcccgggcaccatccgctcgctcttcgcatggatgtcgtcgagctcgggtgggacgtggaatttgctgcggtcgggcaccacgtcggcaccaccgctgacggtctcgatcgtgacctcgtcgccgctcgcgacgttaaggaccggcttcagtttggcttcaaagaagccccaatgacaggtttcgggtgtggatttcaggtgatgatgggtcatgtaacggcttttgattggtttcccagcagcgtatgacgctgtagcagaacttcgcagaggcttcccttgttttttgtgctgtccaagacgctcggcatcatgctgctgccgatcaatttcctgatcggtatcggcgtgatcggcgccgcactgttgccgacgcggtttgttcgcctcggccgcaggttgacggtcgcctcactgctgctgctcgcgatctgcggcttctcgccgctcggcaatgtcctgatcgcgacgctggagcagcgcttcccgccatgggacgcttcgcgcggcgcgcccgacggcatcattgtgctgggtggttcgatcgatgccgatctgtcggtggcgcatggcacgcctgtcgtgcgcagtgcggccgatcgcatcatcgcagctgccgcgctcgcgcgcagatatccgaacgcgcgcctcatgttcaccggcggcagcgcgaacctgatctcgaatgatgcgcgtgaggccgactatgccgccgagatgttcgagagcctcgggattcccatatcgcgactgaccatcgagcgccgctcgcgcaacacggtggagaatgctgtgttctcgaaggagctggtcgatcccaagccgggcgagcgctggctgctcgtcacctcggcctatcacatgccgcgctcggtcgggctgttccgcaaggcgggattcgatgtcgaggcctatccggtcgattggcgcgtcggcaacgtctttggtttcgcgacgcttgcgatcgagggcctgtcgcgcaccgatctcggcgcgcgggagtggatcgggctggtggcctatcatctggccggcaagaccgacgatctgctgccgggaccggccgtgcggtagcgcaaggcggctgtcgcttcgcctgtgcattccggctaacatccacacaacaggcggcgccaagccgccgatcacgggagcttacgcatgcaacagcagacaccgccggaacagttcgatctcgccgcgatcgtcgccgatctgaacaatctgctgcggctgaagaccacggtcatcggcatcaagatgttcgcgcgggtcgaggagatggaggcgatcccgaagatccgccgcccgtcggcggtgcacaccacggaccagatcgtcagcatggcctcgcggctcggctggaccgtcggcatcaccggcgacgatctggtcggcgcgcaatgtcgcgcggtgatcgggctcgcgccgcaggatgagaagtggctcgccggcgagaactatgtcggggtctggcacggcaccgccgaggacgcgcgcaagcgccaggaggcgctcgacgtcgtgccttacgggcagtatcaggcgatggtggtgagcccgctgaccagcggccggctcaatccgcccgacatctgcctggtctacgcgacgccgggccagatgatcatcctgatcaacgggcttcaatatacgggatacaagaagttcgagtggggcgtggtcggtgagaccgcttgtgctgactcatgggggcgggcgttgaagaccggcgagccgagcctgtcgctgccgtgcttcgccgagcgtcgctatggcggtgtgcccgatgaggagatgctgatggcgctgccgccggcccatctggtgaaggcgatcgccggcatgaagcagctcgccaagaacggcctgcgctatccgatcgcgccctatggcatccaggccgacgtccgcgccggcatgggggtgtcctacaagaaatagccgcaagaaatagcggcaggaaatactggattgcgtcgccgcgtccgcgatgacaaaagggcgcccaattcgctgcgcagggagcctgacccatgtcctcgtcgaaactcgacatcgtcgtctacggtgcgaccggcttcaccggccagctcgttgccgagtatctcgccgcgcattatcgcgacggcagcctgaaatgggcgatggccgggcgcagcaaggacaagctcgcctcggtgcgtgacgcgatcggcgcgcccgccgacacgccgctgatcgttgccgacgccggcgatgccgcatcgctgaaggcgatgctggcgcagaccaagtctgtcatttcgacggtcgggccgtatcagctttacggcaacgagctgatcgcggcctgcgtcgaaagcggcaccgactatttcgacctctgcggcgagcccgtctggatgcggcagatgatcgacaagcacgaggccgcggcaaaggccagcggcgcgcgcatcgtgttctcctgcggcttcgactcggtgccgttcgagctcggaacgttcttcgtccaggaggaagccaagcgcgtgttcggcgcgccggccgcgcgtgtcaagggccgcgtgcgcgacatgcgcggcacgctgtccggcggcaccgccgcgagcgccaaggcgactttcgatgcggtcgcgaaggatctgagcttggtcgcgatcctcaacaatccgttcgcgctgacgccgggcttcgagggcccgaagcagccgcgcggcagcaagccggcctatgaggacgacctgcactcgtggaccgcgccgttcatgatggcgctgatcaacacgcgcaacgtccatcgctccaacatgctgatgggctttccgtacggacgcgacttcgtttacgacgagatggtcctgaccggcccgggcgagaagggcgaggccaatgcaaagaaggtgatggcgctgaattccgagaagaccggccccagcgcgccgaagccgggcgaggggccgtcaaaggaagagcgcgagaacggccgctacgatctgctttatctcgcggtcgcgtccgacggccgcatggtccgcgccggcatcaagggcgatcgcgatcccggctacggctcgacctcgaagatgatctcggaatgcgcgatctgcctgttgcgcgacacgcccgatgtcgcgcccggcttctggacgccgggagcggcgatgcagggcaagctgatcaagcgcctggtcgatcacgccgggctgacgtttgaggtcgagaagtaagtcgcgcaacttccaacgttgtcatcgcgcggcactcgaccgggcgatccagtacgccgcggcttctcggctcaagcattgacgtctctggaatactggatgccccgctttcgccgggcatgacagtggtgctacggggcatgacagccgccgcgctacgccgccgcccgcggattgtacgcgtacatgaagtccatgcccttggacgacaccggcagcagcagcttcagcatgtgatcgcgcagccaggcgccggtcgggctaaactcgcgcttgctgttgccgttgcggcgcgcgatcgccacgatcttctccgcgcgcgggcgccgctcgtgctcgaaggcctggaacgtcaggccgagatcctggccgtcgcgcatcagcatgccgagccgcagcgcgtcttccagcgcgagcgaggcgccctgaccggcatgcggactggtggcgtgcgcggcgtcgccgatcaacagtgtgcgcttgcgtgaccaggtcggcagcgtcgcgacgtcgagcgtgtcggtgaccacgatgttctcggcggcctcgatgatctcggggatcggcgcgtgccagccggcgtggaattcgcgcaggtgctgcctgatggcgtgctggctgtgcgaccggtaggccgccgcggtcatgccgtgcgatggctgcgtgctccaccacatcacgccggcttgcggatcggggctgcacatcccgtagccgaagaagccgctctgtccgaacgtcgtctcgacgcgctggccgatcggcaggtgttcgatcacggcgcgcggcacgaagccgccgaagccgatcagcccggtgtcgaacggcgtcggtccgtcagggatcacgtgacgccgcaccgccgaatgcacgccgtcggcaccgattacgaaatcgccctcggcggtggtgccgtcggcgaaataggcgatcacgggctggtcgccgcggtcttcgattttcaccagccgtttctcgaagaataccgagacgttggaagcccaggccttgtcgatcagcgtctcgttcagggtcgcgcggcacatgttcaccgcaggctggccgaagcgctgctgcatgttctggttgagggagccgagcttcttgccgccctgcgaatagaagtcgaaggattccgcgatcgagccgttgcggatcagctcgtcggcgaggccgagctccgccagcacgtgcatgccgttgggtgcgatctgcaggccgccgccgatgccggtggagtagggccaggcttcatagagctcggcctcgataccggcgcgggtcaggaacatcgcggtgaccggacctgcgatgccggcgccgatgatcagagctttacggggacgtctcgtcatgccttgctccatgcatccgtgtggggtaggaaagatcagttgctaattatcttagttgataagatatcaagccagtaagatatgggagtcgcattgtcaagtgcaacgttgcgcaaagcgctgatgcaggaactcgaggaggcgttgcgccggtcatccgcgcagggcgtgatgtacggccaagccgttgcaaacatggccggaatttccaattccgacatggaatgcatggacatcctccagctcgaagggcgggtgaccgcggggcgcctcgccgaagtcaccgggctgacgaccggcgcgatcaccggcgtggtcgatcgcctggaaaaggcgggttacgtgcgccgcgagcgcgacgagagcgaccgccgcaaggtcttcatctcggtggtggaggaaaaggcggtggagatcggcaagttctacgtgccgatgcagcaggagatgcacaagctgtggagcagctacaccgacgacgagttgcggctgctgctgcgcttcgccaatgacggctacaagggtgtgctgcaagcgaccgaagcattgaaagcggtgatcgacacgccgccggagcagcgcgccgaactcaagctaccgccgaagtctcgtcgctgacctcgatcgatgccgcgcgggcgcgctcggttgccgcgtacatgccccacatcgtgcccagcatcatccagaaatgccgccaatggtcagtatcgatgatgaagctctcgccggcgatgccgaggaacgccgagaagatcgccagatagtcgcgctgccacggcacccgcgaatagatgtagcggaagccgatgatcgcgctgacgaacaccagcgccggatagcagatgcccgagatccagccgcccgacatgaaggcgttgaggaacgagttgtgggtgtcctcggggaagtaggtgtggaattgcagcggcccgatgccgaacggcagttcgagcgccatctgggcgccgaggatgtggcggccgaaccggccgaagcggccttcgtcgtagctctggtcgaagcttgcgcgctgcttgaacatgtcggcgaccgtgccgatcgacagcagcaccgcaatcagcgcaaccgccaggatcgcggcgatcaaggtcatcacgatgatgcgcgagcgctgcgcctgcgagcggctggtgaacaccatcagcgccagcatgaaggccgcggtgacaatcaggccaccccaggcggcgcgggagaacgacagcaggatcgcgagcgagatgatgccgaaggcgatggcgttgcggaacgccttgccgaagcggtcggaaactacactttgcagcgtgaacagcgccggcaggatcaggaacgcgccgagcacgttgggatccttgaaggtgccgcgggcacgatcatacagcgtcaagaggtcatagccgccgggcaccagatggaagtagccggcgatgcccgccagcgaggcgatcatcgcgccgacgatcaggccgcggcgcagcatgtcgaggcgcgcctcggtgtcctccgacatcaccattgcgaagaagatgacggtgacggccatgtaccaggaggtgaggacccagttcaccacctccggcttgtcgaggaacggcaccgcgccgatgctgtagccgacattgagcacgatcagcgcgaacagcagtggcatgaacacgagctgcatgcgcaggcccgtggcaaagaacagcacgcaggcggtcagcgtgaccagttcatacgggctcggctcgatgaacacgatggcgatcgacgcgccggcgagccacaccagcgcccgctgcagcgccagcacgcctgacggcgccgatgtcaacgattgggacgtcccggctatcgccgcataggccatcggatactcacgcaacgcaacagacacaaagtgacgcgctttggtgagggcgtcagtgacggcaatcgaactcagtacgcgttctcgtgctttgtaatcagcgagaacggggtcttgagcaggatgtagaggtcgaacagcaccgaccagttctcgatgtaatagaggtcgtattcgacacgcttctggatcttctcgtcggtgtcgacctcgccgcgccagccgttgatctgagcccagccggtgatgccgggcttgacacggtggcgagcgaagtagccgtcgaccgcctcgtcgaacaggcggttctccagcttgctctgcaccgcgtgcggccgcgggccgaccagcgaaagattgcccttcagcacgacgttgaacagctgcggcagttcgtcgagcgaggtcttgcggatgaaacggccgacgcgggtgacgcgcgggtcgttcttggttacgaccttggaggcggtcggatcggcctggtggtggtagagcgagcggaacttgtagacgtcgatccgctcattgttgaagccgaagcgcttctggcggaacagcaccgggccggggctgtcgagcttcaccgcgagcgccaccagtcccagcaccgggagcgccgcaagcaaagccaggctgccgaccacgcggtcgaacagccatttcagcaccaggtcccagtcggtgatcggcgcctcgaacacgtcgagcgtcggcaccttgccgacataggagtaggagcgggggcggaaacgcagcttgttggtatgggccgacaggcggatgtcgaccggcagcacccagagcttcttcagcatctccaggatgcgggtctcggccgagatcggcagcgcgaacagcacgaggtcgacgcgggtgcggcgggcgaactcgacgatgtcgtcgaccttgccgagcttcggcgcgccggcgcaggtctccatcgcgcgggcgtcattgcggtcgtcgaacacgccgagcacatggatgtcggtgtcgtcgtcggcattcagcgcctcgatcagcttctcgccgttctgatcggcgccgacgatgatggtgcggcggtcgagccggccgtcatgcgcccaggcgcggaccatcgagcgcagtgccagccgctcggcgatcaggagagcaaggccgacgcagaagaacgatgacagccagacccgcgagacttcgccgccgagcttgacgaggaaggagatcccgatgaacagcaggaacacgaaggcccatgacgagatcatccgcgtcatctggcggagctggctgcggaagatctgcacctggtagatgtcggcggcctggaagcagaccacggccgccgccgacatgccgaggatcgagccgatgtatccccaatggatcgcgccggcgaacgggcgcacataggcgagataaagcccgatgccgaccaggcttagcagcacgaaatcggcgaggcgaaccacgccggcgatcacgacaggcgagtaggcgccgccaaccttctgattggtgacggcgagcgcggccggcgacaggcggcggcggcgttcgacctgcggctgggcagccgtcgcagacgcagcggcatccagcatcgagcgagcgttaaacggttccacggctccacgtccattcctgcgcttgcagatggtcatccgcgcgcagcagcgaaattccccggacgtgacttaaggtgacaaatcggaagaaacggttacgggcgcaagaaatggttaacgtttggcaaatgcgtcgcgatagccggccagcacgccttcgaccatggcgctctgcgagaaatgctcggagattcgttcgcgcagtttttgcgcccgcgccgcggtcgccgtcgggttgtcgagcgcggccttgatggcgtcggccatcgcggcgacattgctcggcgcgaacaaggcgtcggtgtgggtatcgaagatttccggaatgccgccgacattggcggcgatcatcggaattcccgcagcgcccgcctcgatcaccacatagggcatcgaatcgccgcgcgacggaacgaccagcaggctgcctttcgagaagccgtagcgcgccttgacgtggccgatgaagcgaacggcctcgccgagcgagagccgcttcacctgctccttgagccgttcgaactcctcgccgtcgccgccgagcgtcagcgtcaccggcttgccgccggcccgcagcctggcgaccgcctcgatcagcaggtcggcgcccttgatgcgccggaattcgccgacataggccacatcgctggcatcgtcggccttggcaaccggttcgaattcctccgacgtgacgccgttgaagacgcaacgcacaaggcctgagggcttgccgacggtgcgctgataggtgtcgcgggcaaacgcgctctcgaacaggaacaggtcggtgctgttcatcagcgtgcgctcgagctggctgtagaagcggcccttccaggtgtcgagcgggtagtgcagcgagccgccatgcggcgtgtagacccggatcaccttgttcgaccgccgtcgcagccggacataggcaccggccttggcgccatggccgtgcaccacgtcgggtttcagcttgcggatcaggccggcgatatgtgcccagaccatcaaatcggcaaagcgcggctcgcggcgtatcgcgacccggtggacgccgagcttgaggcgcggctcgatctcggcaagcactgcgtcggcacgcgtgccaccggtcaggctgtcggcgacgatgccgacgtgatggccgcgttcgatctggccattggcaacgtcgaggatgtgacggatgatgccgccgaccggggcacggacgacgtgcaggatgcgcagcggctggtcccgattttgatcctgcgccatcgatcagaaccagcgttcgccgacgaacacggtgtccccggggccgatcggcgtgccgaggggagctgtgaagcggccggcgcccgatgcatcggtgtgggtgagggtgacctcgtcgcgccgtgcgcgcggcgagaagccgccggcgatcgccaccgcgctctcgaccgtcatgttgggcacatagggatattggccgggggcctggacttcaccgaggatgaagaacggccggtaggattcgatctcgaccgccaccgaagggtcgcggatgaagccgttgcgcagccgcgcggtgatctcggcggcaagcccggcaggcgtgcggccgcgtgccggcaccgagccgatcagcggcatcgtgaccgcgccggcggcgtcgatcgcgtacgaattggtcaggccttcctggccatagaccacgacgcggagcttgtcgccggggcctagattataggcctcgcgcgtcggcgcaggctcggcataagccgccggcccggcgaaggagggctgcccgtaagccatcgaatcgagggccgggtcgccggcaagcggcgaggtccgtcccatgcagcccgacagcgcgagcgcagcaaccagacaaacgaggggggcgcgcagatcgcgcatgtgaggaatcccgcgacaaaatataggctcgattaacggcactcatggttaataaaacatgacggtgcggtggtggtcgcatccgtcaaccgcgccgattaacccagcagcaaccttaatggactgtaatcgccggcattgaggtggaatcgcggcgtccgcgggagttcgttatgcgttttgcattctggcgtacaggcaaggaagaggccgtcgtgcagcgggcgctgccgaagtcggcgcccgtcgccggcgaggccgttgcgaagccggctgtgccgatgtcggccccggacgagccggcgcgtacagcgccggcaaccgatctcgacctccatgtgctcggacgcgcgctggcgcgcaagcgaagctggatcgtcgtgccgacggtgctggtgttcgcgttgtcgctcgctgccgtcaacgtcgtgacgccgcgctataagtcggaagcgcgaatcctgatcgacaatcgcgagaatgccttcctgcgcccgaacggcgagcgcgacctcgaacgcacctcgctcgatgccgaggcggtgacgagccaggtgcaactcgtgatgtcgcgcgatctcgcgcgcgacataatcaaaaagaacaagctggccgagcgtccggagttcgatccggtgctgcgcggcttctccccgctgaagtcgctgctggcgctgttcggcatcggccgcgatccgttcagcctgacgccggaagagcgggtgctcgacgccttctatgagcgctaccaggcctatgcggtcgacaagtcgcgcgtcatcgtggtcgagttccagtcggaagatcctgatctcgccgcccgcgtcgcgaactcgatcgcggacggttatctcgtgctgcagcaggcggcacggcaggaccaggccaagtccgccagcacgtggctgctcggcgagatcgacaagctgcgcaccaaggtcgccgacgcggattcgcgtgtcgaggaattccgctccaagtcgagcctgttcgtcggcaccaacaacatcccgctgtccaaccagcagatgggtgagctgaacacgcagctcaacaatgcccgcgccctgaaggccgatgccgagaccaaggcgcggttgatccgcgagatgattcagagcggcaagccgatcgaggcttcggaggtgctcaattccgagctgatccgcaggctcgccgaacagcgtggcacgttgcgtgcccagctcgccgagcagtcgtcgacgctgctagacaaccatccgcgcatcaaggaattgaaggcgcagatcgccgacctcgaccggcaattgcgcgaggaagcgggcaagatttcgcgctcgctcgataacgacgcccgcgtcgccgacggccgcgtccaggcgctgcaggcgagcctggaccagtcgaagaaacaggcgtcgtcgagcaacagccaggacgtgcagctccgcgggctggagcgtgaagccaaggcgcagcgcgatctgctggaagcctatcttgcgaaatatcgcgaggcgaccgcacgcgagaacatcgaggcggcgccgaccgacggccgcatcatctcgcgcgccacggtctccaacacgccggcctatccgaagaagctgccgatcgttctgatcgcgacgctggcaacgctgttgctgtcgtccgggatcatcatcaccggtgaattgctgcgcatctccgcgcccggtgcggtgggccgtgccttcgcgccggccgccgccgtgatccggcgccgcgaaccggtcatggagactgtcgccgtggacgagccggcgccgaggctgccgcctgaacccgcgctcgcatcgccggtcgcgcccagcctttcgccggagccggcggcgccatacgagcccgtcatcagcgagccgcagcctgcacccgcccggaccgtcgatgagatcgatgcgctggccgagcggctcgtcgcgtccggtcccgccgcccacaaggtcacggtgctcggcccggccaccggcgagagcgtcacgctgaccgcgctgacgctggcccgtctgatggcgcgccaggccaaggtcgtggtggtcgatctcgtcgcatccgcgccggtgttggcggcggccaccgtcgatcccgccgcgcccggccttgccgaattgatgcagggtgaggcgacgttcgcgcagatcatcaccaaggatcggcagtcgcgggttcagatcgtcagcgccggccgtccgggcttcgatcgcgcgcacctgcaatcgccgcggctcgcgcttgcgatcgacgcgctgctccgggtctacgaccacgtgctgctcgacgccggctcggccgtcgacctgccggccgagctgctgaccgcgaaggcgcaggccgtcgtcgtgcccgaccccgcaatggcccaggatgcccgccatcagatggtcgatcagctcagggccgtcggcttctccgaagtgacgatgttgagcaagccctgcgcgccctcggaaacggtcgcgaggggcccgcgggtggtggcggcctgaccgccaccctcaatgcgccagcatcggctcgcgcgcggcgcgctccaggaccggatcgatccgaagccggatcgtgaccagcgcgccgatcaagccgacgaccgcgagcagcagcaggcctgcggtgaagccgccggtcaggtccttcagatagcccatggcgaacgggccggcgaagcctgagagattgccgagcgaattgatcgcggcgatgcctgccgcggccgaggcgccgttcaggatgctggccggcatcggccagaacatcggcggcaccgccgacacgccgatctgcgcgaggcagagcaggcccacgatcagcaccggactggagaccagcccggcgaggccaatgccgacggccgcgagcaccagcgcgccggcaacgtgatagcgccgctcgccggtcttgtcggaatggcggccgagcagcaccatgccgaccgcgccgaacacgaagggcagggctgcgatcaggccggtctgcgtgtcggtgacgccgaaagccttgatgatggtaggcaggaagaacgcgacgccgtagctggcggcgttcaggcagaaatagacgagggcgcaggcgaggacgcgcgaatcggtgagcgactgcatcaccgagatgtgctccacggcttccttcttctgccgctcggtctcgagggtgttctgcacccacttgatctcgtcgggctgcaaccagttcgcctgacgcgggaagtcgggcagcatggcgagcacggcgaatccgaccaggaccgacggcagcgcttcgcagatgaacagccactgccacccggtcaggccggcgcccgacaaattgagcagcaggcctgagatcggtgccccgatgatgctggagatcgggatcgcaagcatgaacaggctgatgacgcgggcccgatagatcgtcgggaaccagagcgtcagatagaagatgatgccggggaagaaaccggcttcgcaggcgccgagcagcaggcgcaggaagtagaagatccactcgctggagaggccggtcgccgctgacatctgcgggatgaacgcgaatgccgccgagacgatgccccagctgatcatgatgcgggcgatccagcgccgcgcgccgaaccgttccagcaggatgttggaggggacttcgaagaagaagtagccgacgaagaacagtcccgcgccgagcccgtaggcggcttcgctgaggccgagcgccgtgttcatgtgcagcttggcgaagccgacattgacgcgatcgagatacgccacgaagtaacacaggatgaggaacggaatcagccgtcgcatcatctttccgatcgcgcgcttctcgacatcgtcgctcatcgttcccatcccttctggctatttgtattggcgcaaggtcaccgcgctgtccggggtgaaccattgtacacccgcagcggtccgtcgctttgtccttgcaagcctgcttgcaagccttgcattcattcttgtgtaatcgacggccgcgtgactaatggcatttgggaatggagccacggcgaaactgtcatgatgcactgcggtatggtcgcgggaactcgagtgtttccagcgaagtggacgccgggtcgcgtggagtaaggcgcgtctagacaagaggctggagtcccgttcgttccgattaaatcggatcggacggctctggccgggcaggatggtagcgggccgtgatcaataatctgaagttgcgccagttgcgcctgctggtcgcgctcgacagcgagcgcaagctgcagctcgcggccgagcgcctgaacattacccagtcggcggcatcgaagatgctggccgagatcgaggccgtggcgcgggttccgttgttcgagcgaacggcgcgcggcgttgagccgaccgcctatggttcgatcttgatccgtggtggccggagcgtcctcgcggaccttgaccgggtcaccaatgagttcgccggttaccggtccggcgagcttggcacggtatcggtcgggacggtcgccaagcccagcatcgaccttgttgtcgacgtcatgcagtaccttggcgagaaactgcaccgggtgagcatttcgctcgacgtcagcaccagtccgccgctcgttgcgcgtcttctggcgcttgagctcgacttcgtcgtggcgcgaattccggccggcgtcgatcccggacaattcgactatcacgcgatcggcgccgagcaggccggcttgctggttcgcgccgagcatccgctcgccggtctcgacagcgtcaatctcgaggatacggtcgacctgcaatggatcatccagccgcgggaatccttcatgcgccaggggctggagcggctgttctacagccggggcattgcgccgccccagcgcatcatcaacaccgagtcgttcttcgcgtcgattgggatcgcggcgggcatcgatgcgatcgtgccggtgccgctcctgatcttcgatctgctcgatccgcagcgcttcaagatgcttcgtatccgcgaccagctgatgctcgagagctacgggttgatcaagctgcgcaagcgggcgttgtcgccggccgcgatgctggtgttcgatgcgatgatgcggcttggcgtcgcgaacggccgcgcggcgccggatggctcgtcgccgtagcgccgccggtcgtgctcagcggaacatgctgcgcaggttctgcgcgatttcgaacagcgccggattttgtttcactgcgcgcttggcgcggctgatggccgaaagcgcggtggccgccggcttgccgcgcaggctgagcggaatgaagctgtcgacgatcgcttcgtcgtccttgcagaacagccgcttgtactcgtccgagccgatgccgaggtcgaaggcgcgatagttcaggccggcatggcgatcgatgatgtcgcgcatcaggatcaggccggggctgaacttggaattggccgacatcgtgtaggtgttgaacatcatcgagaagcgatgaccgtcggacacgccggcaaagatcgcgatcacttcctcgtcgcactccagcgcgtggatgtcgatcgcatagcccttgccgtcggcgcgcggcgcgaggcaggcggtgcggatgaactgctcgatgcccggctcggcgaacacgttgggcagcttctgctccgccatgcgctccggcttgacgcggaagaaccagtcgagcagtcggcagacgtcggcgccgttatctgcgacatgatagcggtagcccggcagcgcctgcagcttgcgttccttgcccttgaggcgtcggcggaacgagttgctgatcagcgaagcgggtgccgcgccgggctcgatgaccagcagtgggcagtcgttcaccgatgtctgatgcggcagcaacaccatcggattgggctggtcctgccagcgcagcggctgctgacacagcatcagcgcgtcggcacgggatcgctcggcgattgagccgatcaaggccgagatgtcggcttcggtcgcgttggcggcgaagtcgcggtcgtacagcgccatgttgaaggtggcatgtttgccgcccatgaagcttgcgcaattggcgcccaggcgctgttcgacggcgagcggcaacagcagcagcggacggcgctcgctgtcatgggccaccacgatgaagggccgcaggccttcgcgctcgccgacctggcgttgccaggaggcaaggaagtcgaagcgctgatagggtgtgtagctgtgttgcggtgtttcgagactgcgccaggtcgcctcggctgcagtgaggtcgtgaaagatgtcgacgccggcgatgcggattgcgttcggccatgttcgcgtgcccgccgtctggccttccattgccgccgccatggtcatctcggaacccaaattttttaaggtattaatttacagttctcggctgaggccgaccttcgcagggaaatgtcaacaaagagtaataacaatcgcccgacggtggacgtgtgggaaccgccgggcgaggcaaggacggtaggggatcttggcgccggaccgggggattttgcggcgagcccggatggagctcgcatatttcagcggcgccttccggctgcgggagcgcgagaccgggggcgccggggtgatcctgcgtttcgcgcgcgtccgtcccgcccgtcgggcccggttccagccgctgagacctcacgaggtctcgccagcattcctcgatcgcacgatccgcgcgctgaagcgctggaaatacgacatcgtcgggatcgacgaagcctgccgccgcgcggtgaccatgccggagcgccgccgcttcgcctgcctgaccttcgacggtgccagcaaggacatcgtcacccatgcctatcccgtgctcgccaggcattccgtccccttcacgctctatctaccgaccgcgtttccggacggcgtcggcgcggcgtggtggctggtgctcgaggacattatcgcgcgcgagagccgcatcagccttgtgatcgacggccgggaacggcatttcgtggtctcgacgctgtcggacaaatacgagctgttcgatttcctgtccggctggctgcgcaagctgtcgccgcctgatctgtcctatgcggtgaacgatctcgcgcggcgctattcggccgacgctgcgcaactgtcacgcagcgcctcactcgactggcaggatctggcgaagcttgccgcggatccgaacgtgacgttcggcagtgccacggtgaactattccgctctgtcgagcctcagggacgccgacgcagagcgcgagatggcgatgggaaaggccgtggccgaaagtgcgctccggcggccggtcaggcatttcgcgtatcccttcggggatcgcgaagcattcgcccgtgcacatgtcgtgatggccgaggaagcgggctttgccagcgcggtgtcgaccatttccggcgtggtcgaggcgcagggccgcaccaacctctacgcactgccgcgcatcgcgtgggacggccgcgtccgctcgctgcggatcatgcgggtgctgctctcgggcgtgatgttcgcgccggtgcggccgacgcggagcgcgcgggagcagggcgtgctctaagcgcgatcggggcgcgacatccaggacacgatcggcatcgccggcagcacccagccgagccccgcgacgacgtagaagacggcctgcagcagcccggagttggcgagccacggcgtctgggcgaccgtcatgccgagcagcgaccacaccacgaccaggatgagcaggaagatggttccgagcagtttgcgggtgcgtatggccatggcttgtacgtgtaactcgtgatcctgaacgtcttcggcggtgcttgcgccgcgggcgcgccggactataaggggcccgaaaatccaatcaagtcagggcgaaatggccggtatttccgcaaagacatcgcagctccgcgccgtcagggtatggctgatcgcggtcgccggcctgatcgcgctgatggtcctggtcggcggtgccacgcggctgaccgagtccggcctgtcgatcgtcgaatggaagccggtgaccggcgcgctgccgccgctgaccgaggcgcagtggacccaggccttcgcgggctatcagaagattccgcaatatcgcgagctcaacgccgggatgacgctcgccgagttcaagacgattttctggtgggagtggagccaccggttgctcggccgggtgatcggcgccgcctatctgctgccgttcctgtatttcctgtggcgcggcgcggtgagcggtgagctcggccgccggctgtgggtgatcttcggcctcggcgcgctacagggcggcgtcggctggtggatggtggcgtccggcctctcggagcgcgtcgaggtgtcgcagtatcggctggcgacgcatctggtgctggcgctgctgatcttcgcggcgatcgtctggacgctgcgacggctgacggaccgccccatagtgatcgcgccgctcaggctgaagatcacgagcgcggcgctgctcctgctcaccttcctgcaactctatttcggcgcgctggtcgctggcctgcgcgcgggccgggtttacaacacctggcccgagatcgacggcggcttgatcccgtcggccgaccggctgtggttcgagacgccatggtggcgcaatttgttcgacaacacgctgacggtgcagttcgagcatcgcatgaccgcctatctcttgttcgcgctggcgatcgcacacgcgatcgatgccgtgcggtcgcgcgccggcggcggcgtgatcgcgggcgcctggtggctggttgcggcgatcacgctgcaggcgacgctcggcatcctgacgctgctgcatcaggttccgatcgatctggcgctgacgcaccaggcggtcgcgatcgtcgtactgacgctcgcggtgttgcaggccgagcggtttgccgcgcgccgaacggaacaaggccagccgaatctcgttccggctggccagtccctttgatcgatcacgacaggtagtcgagcccgatatcgagcgcggccgaactgtgggtgatccagccgaccgagatcaggtcgacgccggtggcggcaatcgccgcggcagtcgcagccgtgatgcggccggaggcttcggtgatcgccttgccgcgtgccatctgaaccgcctggccgagctgctcggtcgtcatgttgtcgagcagaacggcgtcgacgccgagcgccagcgcttcctcgagctgcgacagcgtgtcgacctcaacctcgatcttgaccatatggccggcattggccttggcgcgttcgatcgcggtgcggatgccgcctgcgagcgcgatatggttgtccttgatcagcatcgcatcgtcgagcccgaaacggtgattgccgccgccgccggcgcgcaccgcatatttctccagcgcccgcagtcccggcgtggtcttgcgggtgtcgacgatttgtgcgcgcgtgcccgcgaccgctttcaccagcgtggcggttgcggtcgcgacgccgctgagatggcagaggaagttgagcgcggtgcgctccgcggtgagcaggccgcgggccgggccgtcgatgatcgcgatcacctggtcgggctcgaccgcgctgccgtcgggtcgctcggcgcgcagctcgatcgctggtgacaccatctggaacgctgaccgcgcgacgtcgagtccggcgatcacaccgggctgccgcgcccgcatcaccagccgcgcctgctggccggccggcacgatcgcatccgcggtgatatcgccggcgcggccgagatcctcgcgcaaggcggtctgcacgatcggctcgtacagcagcggcaacaggggattgagggtggtcatgagcgggcactcctggctgaaggcttggattcgacgatgtcgcgcgcggcggcgagcgcctcggcacgggtgagggacgatggagccgccgacaaggcggtgtgcgggaaatcgctgcggaaatgaccgccacggctttcctcgcgcctgattgccgcgacggcgatcatcaagccgaccagcgcagcgtcggatgcagcattgggaccgcgcgcgagcggatagagactgcggatcgcacgcgcgatcccgtcgcggtcacgcaagacgccaagcccctgcgtgaggatcgggcgcaccgcggagggatcggctgccggcggcatgggatcgtcgcgcagcatggcgcgcggaccagcgctcatgccttcgacgccttcggcgacccagcttgcgcagacgatcgcttccatcagcgagttgctggcaagccggttggcgccgtgcaggccggtgcgcgcggcctcgccgcaggcccacaggccctgcacggtgctgcggccaaaaccgtcgaccgcgatgccgcccatgtgatagtggaccgccggccggatcgggatcggatcatgggcgggatcgatgcctgccattttgcagaacgcgctgatcaccggatagcgctgcacaaaatccgcgcccggattcttgcgcgcatcgaggaaggtgcgatgcccggcggcacgatggcgccacaccgcacgcgcgacgatgtcgcgtggcgcaagttcggcgccaggctgatcggccatgaagcgttgcccggtctcgtcgatcagcacagcgccgtcgccgcggatcgcctcggtcaatagcggcatcggccgcgacggcccgtcgaaggcggtcggatggaactggacgaactcgatgtccgacagtgctgcgccggcatgcgctgcgagcgcgagcccctggccgaaacatccgccggggttggtgctgtcggcgaacagcccgccaatgccgccggtcgcgatcacgacgcggttggtcgtgatcgcaagccggccgcggtcgctcgccgcgagcacgcccctgaccgcattgtcctcgaccagcagccggcgcgcctcgacgccttccagcaacgtgatcgacggtgtccgacggaccgcggcgatcagcgcgcgcatgatctcgcggccggtgccgtcgccggtggcgtgtacgatgcggttgcggccgtgcgcggcctcgagcccgagccgccagctgccgtcggcgcgacggtcgaaggcgacgccgagttcggccagttgttcgacggcggcaggcgcagcatgaacgatccggctcgccgccgctgcgtcgcaaaggcctgcgccggccgcgatcgtatcggcgagatgcagggcaggcgtgtcatccgcgccgactggcgcggcgaggccgccctgcgcccacatgctggaggcttccgcgccgagcggagatttggagatcagcacgaccggctcgggcgcgagctgcagtgcggtcatcagtcctgcggcgccgccgccgatgatgaccgggcggccgttcagattggagagatcggtactcatatggccagcatcctttcgacgctcttgcgcgcgcgatcggcgatttcggggtcgatcgtgacttcatgctggttggtctccagcgcgtggcggatgttcttcagcgtgatccgcttcatgtgcgggcagagattgcaggggcggacgaagtcgacgccgggattgcgcgccgcgatgttgtcgctcatcgagcattcggtcagcagcacgacgcgcggcgggcgcttggtctcgacgaatgtctgcatcgccgccgtcgagcctgagaaatccgcttcggcgacgacgtcgggcgggcattccgggtgcgcgaggaccgtgacatccggataactctcgcgcagctggcgcacgtcgtctgcggtgaacagctcgtgcacctcgcaatggcccttccaggcgatgatcttcttgctgctctgcttggcgatgttctgcgccagatattcatccggcagcatgatgacgcgctcggcgtcgagcgattccacgaccttgagcgcattgcccgaggtgcagcagatgtcggactcggccttcaccgccgttgaggtgttgacataggcgacgaccggcgcgtccggatagcgcgcgcgcatcagccgcacgtcctcggccgtgatggagtctgccagcgagcagccggctttgaggtcagggatcagcacggtcttggctgggttgagcagcttcgccgtctcggccatgaagtgcacgcccgcgagcacgatgacatcgacgtcgaccttggtcgcctcgcgcgcgagcaggaggctgtcgccgacgatatcggcgacgccatggaagatttccggcgtctggtaattgtgagccagcaccacggcgttgcggcggcgcttcagctccaggatcgcgtcgacgtcctcggcgaatgtagcccattcgaacggcgggatgacgcgtttgacgcgctcatagagcggcgcggtccgggtgagaagatcggtatcgagcagggccatttatactctccatgagcataagatggcttatacttatcctgagcataaggcgtgtcaagtgcgcgaaagcggaagcttggtgccggcgacggccctctcggccaatacgccgtggcggaagcggaacagcttggccggccggccgacggtatcggcggccattgcaccagtctcttcaacgagttcctgctgctcgatgagacggcggaagttctgcttgtggaccagccggcctgcaagcgcctcaacactgcgttgcaattgcagcagggtgaactcggccggcatcagttcgaataccaccggacggtatttgatcttggcgcgcaaccgcgcgatcccggtcgccaggatgcggcgatgatccgccgtcatcggcttgcccggcacgaccgacgcctcgcggccgcgcgcgcggttcgcttccggaatcagcgatgcctcccagagcagttcgtagcgctgcagcaccagttcttcattccagtcacgctcgtcgagaccgaaggtgatggcgcagcgctgccagcgctcgcgctgcaacgtcggtgagggggcttccttcgcccacgccttcagcttcggcgcgatcgtcttggcgatgaaggccggtgcaccgtcgcgatgatcttcccagggaaagtagtcgtaccagccggaccagtgcgcctcaaaaccttcgccgacccggtcctcgcgggtcaggccgagatagctgatcgaaacgctatgcggccccttggcgtcgccggaccggccgcggtcggcaaaggtgtagagctgctcgacatagccgagcgggtggccggtctgcgcctcgacccaggcccgcagcgcggtctgcagcgagcgatgcgtgaactcgaacgggccgctcggcagcgcggcgccgccggcgatggtcatgatcttcggcgtgccgtcggtgacggcgaccagcaccgcgacgaggtcggcggtgaccgcatttcccgaagccggtgcgctggatttttgcggcgatctggccacgcgttcgtcccgcgctagcagtagccgtagacgccgcaggcgtagggcaggcggtcccagtagtcgacataggcaccgccatagtacgggccgagatagctgtaggagccggcgttaccgtaatagccgggcagcgacgacgacccgggcagcagcggttctccccgcacgaacgggatatacggcgctgagttgagcgggatcaccttgggctcgacgaccacgagctggcggccgcgccgtacataggtcggacctgtaatggtggtgcggtaggcgtagtgcgggcgcggcaggcccgcgggcagctggcgcgcagccttcacggcggcgctcttcggggggacggggccgtcggcagcatcagcaggcgacatcgcagacagtgcgatcgcgagcggcaatatccagcgcagcatcaatggtctcccgaatcatccggagcctaccactgccactttaagccggattgaacgttaacgggtggcctgctggcattaagcgttaacggacaaggcggtcgcgttggagagcgtccggagcgatgcagggcaccgctccggaaccgctccgggctcaggcgcgcagcgcctggtcgaggtctgcgatcaggtcttccttgtcctcgatgccgatcgagagccgcaccacctcgggtgccgcgcccgacttcaccttggcggcgtcgtcgagctggctgtgggtggtcgaggccgggtggatcaccagcgagcgggtgtcgccgacattggcaagatgcgagaacagcttcaggttcgacaccaggttgacgcccgcgtcgtaaccgcccttgaggctgaaggtgaacaccgcgccggcgcccttcggcgcatatttgcgttgcagcgcgttgtaccgatcaccgggcaggccggcatagttgaccgcggacacagccgggtgggtggagaggaattccgccaccgccttggcgttgtcgcagtgcttctgcatccgtagcggcagcgtctcgatgccggtcaggatcatgaaggcgttgaacggcgacagcgcggggccgagatcgcgcaggccgagcacgcggcaggcgatcgcgaaggcgaaattgccgaaggtctcctggatccggatgccgtgatattccgggcgcggctcgctgagcatcggatatttgttgtccttcgaccagtcgaaggtgccggcgtcgacgatgatgccgccgagcgagttgccgtggccgccgaggaattttgtcaacgagtgcacgacgatgtcggcgccatggtcgatcggcttgatcaggtagggcgaggccagcgtgttgtcgacgatcagcggcacgccggccttgcgcgcaacggcggcgatcgcctcgatatcggtgatgctgccggcaggattggcgatcgactcgatgaagatcgccttggtgtgcggcgtcaccgcacgctcgaagctttcgacctcatcaggatcggcccaggccacattccagccgaacgccttgaaggcgtgggtgaactgattgatcgagccgccatagagcttgcgcgcggcgatgatctcgtcgccgggcctcaacagctgttgcagcacgacgagctgcgcggcgtggccggaggcgacggcgagtgccgcggtgccgccttcgagggcggcgacgcgttcctcgagcacagcgttggtcgggttgccgatccgggtatagatgttgccgaaggcctgcaggccgaatagcgaggccgcatggtcggcatcgttgaagacgaatgacgtggtctggtagatcggcgtcgcccgtgcgccggtggtgggatcaggctgtgcgccggcgtgcacggcgagggtggaaaatcccggaaggcgatcggtcattcttggtgtcctgttgtggcctgtcgaaacgcgcggcatgctgatggcggcggcgcccgccgtcaagcgagttgggtgcgccgccatttcttgtaatgggcatcctacgccataccggacgagcggaacgattattccgccggggtgtcaggtggtctcggtcttgcttttcgccgcgcggtcggatgccgcagtctggccgccgccgaaactggtgcggttgagcgacagccgcatgccctgggtcgggatcggcgcgcgcttggaactcagggtgcgcgaattgacgcccatccaggagatctccgacgaaagacggccatactcgatcttcgggcagcggttcatcaccactttgaggccggcggcctcggccttctcggcggcggcatcgtcacgtgcgccgagctgcatccagatcaccttcggctgcggcgacagtttcagcgcctcatcgaccacgggcatgatgtggctggaattgcggaagatgtcgatcatgtcgaccggccgatcgatgtccgcgagcgaagcgacgaacggcttgcccatcagcgccttgccgacatggccggggttgaccgggatcatgtcgtagccgcgctgcgccagatatttgaaggcgaagtagctcggccgcacattgaccggcgaggcgccgaccatcgcgatcgatttgacgttgttgaggatgctgcggatgtaattatcgtcgtaggcgtcgtggttcattttggtcttacttgtcctgccacttcggatcgcgcttctcgatgaaggcgccgatgccttcctcggcgtcgcgcgccatcatgttctcggtcatcacttcagccgcgaagcgataggcctcagtgaggctcatctctgcctggcgatagaacgcctccttgccgagcttgacggtgtaggccgatttcagcgcgacctgctgtgccagcgcgatcgcaacgtcgcgttcggtgcctgcgggcaccacccggttgacgaggccgatgctctgcgccgttgccgccgagatgggttcaccggtcagcagcatttccatcgcctgcttgcgcggcacgttgcgcgacagcgccaccattggcgtcgagcagaacagcccgatgtcgacacccggcgtcgcaaacgcggccgcctcggaggcgaccgcgagatcacagcttgcgacgagctggcagccggccgcggtggcgatgccctgaacagccgcgaccaccggcttcggcaggtgcacgatcgcctgcatcatcgcgctgcaggcgttcatgatctcagcaaaataggcgcggccacgatcggcatcgctgcgccgcgcggtgagctccttcatgtcgtgcccggcggaataagccgaaccattcgcggcgatcacgacggcgcggacgttcctgtcgtcgcggatgtcgttcaacgcagcatggaggccggcgatcatgccctccgaaaggctgttgcgcgccgcggggcgattgagcgtcagtagcgcgatactgccgacggtttcgcgcagcagaatcggggattgcggcgcttctgcgccggcggtttgggcggacatggcgaaattccactatcgtgtctgtgacaatttaatgtaacaggctggctgaagcgagggcagggtccgcatggcaattgcgaaaatgagcgtagctgatctggaggagttcctgcgcaaggaatttccgcaggcgttcacccacgatgatatcaggatcgagagcgctgacggcgagacggctctgctgcgtcagcgcttcagcgagcgcatgctgcggccgggcggcacggtgtcgggaccgaccctgatggggctggcggatttcgcgatgtatgtggtgctgctgtcggcgatcgggccaatcggcctcgccgtcaccaccaacctcaacatcaacttcctgcgcaagggccagccgggacaggacgtgcttgcggtcgccaagctgctcaagctcggaaagcggctggcggtcggtgaggtgaacttgctgtccggtacctcgcccgatccgatcgcccatgttacggcgacctattccattccaagtcaatagtgtttttcacggtattattgcaccatatttttaagctattgtttttgctaatgtaattatggcgcgtggacattgacgtgtgtccgcggcttctctagaaagccgcccagttcggcgcatacggcgccgatttctttttcacggatttcacacatgagcacgttctcggccaagcccgccgaagtgacgaagaagtgggtcgtgatcgacgccaagggtctggtcgtcggtcgtctcgccacgctcgtcgccatgcgcctgcgcggcaaacacctgcccacctacaccccgcatgtcgattgcggcgacaacgtcatcatcgtcaacgccgcgcatgtggtgctgaccggccgcaagcgcgaccagaagacctactacaagcacaccggcttcatcggcggcatcaaggagcgcaccgcgaagcagatcctcgagggtcgcttccccgagcgcgtcgtcgagaaggcgatcgagcgcatgatcccgcgcggtccgctcggccgcatgcagatgggcaatctgcgcgtctatccgggtgccgagcatccgcatgaagcgcagagccccgagaaggtcgatatcgcttccctgaaccgcaagaacacgagggccgcataatgtccgatacgttgcagtccctcgatcagctctcgcaggtcaagccggcggcgcccgacgcgccgaaatacgtcaagaaggtcgacaagttcaatcgcgcctacgccaccggcaagcgcaaggacgcggtcgcccgggtctggatcaagccgggcgccggcaagatctcggtcaacacccgtgacatcgaaatctacttcgcccgcccggtgcttcgcatgatgatccagcagccgctggtcgcggccgcccgcaacggccagtacgacgtgatctgcaccgtcgccggcggcggtctgtccggtcaggccggtgctgtcaggcacggcatctcgaaggcgctgaccaacttcgagcccgagctgcgcggtgtcctcaagaagggcggcttcctgacccgcgacagccgcgcggtcgagcgcaagaagtacggcaaggcgaaggcccgcaagtccttccagttctcgaagcgctaattcgagttctaaaattcgcggcaattgccgcgtgcatcgagttgcagagggcgccgcgaggcgccctttttgctgcgtccaacgacgccgtgtttcgacgcgaattagcgcagtttttcaagaaaacttgcgtgtgcgtgcaaacgaaattggaactcgggccttctagcgtgctggctcgcactggcgctgcatcaccgcattatctgcgcctgcggacgttgcatcacaccgggctggggtgacctatgtcgttcgatccatcgacgctctatttgttcgccaccatggtcgcgggcatgctcggcgccatgctctggttgttcggcaggcaggagaacattcccgcgttgaaatggtggggcaccgcctatctgctcggcgcagcctccgtcgcgctgtggacggtcggcggctcgacgctcgatcggttcgtcctgctgggcctcaatgcaatcggcttcgccgcatgcggcatggtctggaatgccgcgcgtatcttccacggccgcaaggccaatctgccgggcctcgtgctcggtccgatcgcgtggatcggcgctgtgacgacgatcgaggatcccgcgatgcggctgacgatcggcgccgggatcgttgcggtctatgctgcgctgaccgcttccgagctgtggagcgagcgccgccgcgccatgcagcggcgctggattgcgatcgtcatcccggtcgcccatggctgcgtcctgatgctgcccatcctggtcggcgacctgctgcggctgaacggtcagaatttcgtctccagcttctgggtcagcctgttctcgatcgaactcgtgctgtacgcgatcggcacggtgttcgtgatcttcatgatggtgtcggaccgtgcggtggccgtgcacaagaccgccgcgtcgatcgatccgttgagcggcatgctcaatcgccgcggcttctccgaggcctgcgcgcgcgtgatcgagcgcgaggccactgccggccggccggtcacggtgatgatcttcgacctcgatcatttcaagtcgatcaatgatcgcttcggtcatcccgcgggcgacgagatcctgaaactgttctccgccgtcgtgatcaacaatctcaggatcagcgatctgtcgggacgaatcggcggcgaggaattcgcggcgctgctgccgtgctcgctggaggagggcgtgctggtcgccgagcgcgtccgggaggcgttcgagaacagcaatatcacctgtgaggaaggcgcggtcgacaccacggtcagcattggcgtggccggcggaccggccgggaccgagctcgaggtgctgctggcctcggccgacacggcgctgtaccaggccaagcgcggcggccgcaaccgcgtcgaagcggccgaggaattaccgctttcgctggagaactggcggcgcaagaccgcgggcctgccggcatcggcacggcaaaaaccggtgaccgctcgcgcgtgagcgcggtaacgactggttaaccattcactcccatgctttcagcatggagtcgatccgcacccgcaatctgcagtcagccctgatgtcgctcgaagccgacgcggcttcggcgggcagcggcttcgcctgcctgttctcggactcggatgaatacgaaaccgcgctgatcgctgaacggcgggcgcagggccgatatcagcgaccgcggagccgctggccggtcgccatgctgctcggcgtgatgctgatggtcgtcggagcagtcctgctgctctcctgaggcgagctcatacggcctttgcaggtaccggatcgtccgccttgaagtgatcgatcatcaccttggcgatcgccatcagcggcagcgcgagcgcgagcccccagatgccgaacacgacgccgagcaggatctggaacgcgaacagcgttgcgggcgggatgtcgagcgcctggcgctggatgatcggggtcaggacgtagctctccagcgcgtgcacgccgaggaacaggatgaaggccgatagcgccgcgatccacccggtcgcaaggcttgccagcaccacgatcagtccgccgaggatcgcgccgaccgtcgggatgaaggcgagcaggccggcctggattccgaggatgaacgagctcgggatgccgatgatggcgagcccgatccaggtgacgaggaacaccgcggtcatggtgatgatctgcgcgatcagccagcgttccagcgtctcaccgattcggtcgacgatgacggtcgcctgaccgcggtatttagccggcgcgaggaacagcagtccggcgcggtagatgctcggctgcgccgcgaaggcgagcccgaggaacagcacgatgaagaaattgccgacggcgctcaccgtgccgagcagcaccttcaacgtctggctgatgatggcgccaccgctggaggcgagcgcgccggcgccggggatgccatgcgactgcgacgctgccggcgtcgttgtcgttgtcgccacggcggtgccttccggcttcgcctcgccggcggcgctggcgaaatccaggtagctggtatcgacgccgcgctgttcgaggaattccttgacgctgccgagctgcgatttgatggtgttgctcagcaccgtggcctgctgcgcgatggtggtgccgccgaggaacacgatgccggacagcagtccggccatcgccaggcagacgatcgcaagccggagcgcatgcggcagcccggtcaggcggccgagcagggtggtcatggcattgaggccgaccccgagcagcatgcccgcgaacagcaggaacagcgtcgcggcgaactgccaggcgaacagcagcagggcggcgaacagcacgatgccgatgccgccgatggcgatcgcccacgccaggtcgttgcgggcctgcaggcgattgtcagccgagtcagtcacgggtgattcccccttcgcggacggtgtctggtgcagtctttggcgaaaatctcgccgggatcaagctgggcgggaccgtgctggtttgccgctgccgttccgtgccaacggggacgagctgcaggcgttccgccggatttcggcccaccggggtgccagcctgtgcaggcctgcaagcccccctgtgcaggaatagacggttgatccccggggaactcgaaggcatgatcgtcttcgtaatgtcgcaaacttagaagaatcattgcgcgagacttcaataatgagacggcccgtggtcggcgtgatcggaaacgcccatcgcatcgaaaatcgtttcacggtccagatggtcggagagcgcaaccttcgcgcggttgccgaggtgtcgggcgccgtgccgctgatgttcgcgggcagccccgaaatcaccgaggtcggcgccttgctcgacgtggtcgacggcgtggtgctgaccggggcgcgcgccaacgttcatccgacccgcttcaacaccgaaccctgcgccgcgcatgagccctacgacatccaccgcgatgacgtggcgctggcgctgtcggaggcctgcgtcgcgcgcggcgtgccgatcttcggcatctgccgcggcctgcaggagatgaatgtcgcgttcggcggttcgctgcatccggagatccgcgagattcccggccgcatgaaccaccggatgccgcggctggagaacggcgagatccatcccgatccgaccgtcgtgttcgccgaccgtcacgacgtcgcgctgacgcccggcggggcatttgccaagatccttggccgcgagaccatccgggtcaattcgctgcacggacagggcatcctcgagcccggcaaacgcgtcgtgatcgagggcattgccgaggacggtaccatcgaggcgatccgcattgcggacgcgcccggctttgcgctcggcgtacagtggcacgccgaatacgatccgcagcgcaacccgatcaaccgcgccttgttcgaggccttcggcgatgcgctgcgcgagcggcggcgggcggcgtagggcggcattgccgccgtcacctcctatcgcgcgccggctgacttgcgaaacaggcgcttgaggtccgccgccgcggtctgcccggactgcaattgctcattgcgatcgtgctggacctgttgcggacgataggcttcttcgagggtatcaagctcctggtcggtgaaccggatgtcgagcgcagtaatggcgtcgtcgatatgatggagcttggtcgcaccaaggatgggagccgtcacggctggattgtgcagcaaccaggcaagcgcgacctgggctggcttgcacccgcgcgcctgtgccacggcaaatacgcgatcaatcaccgcgtcgtcttccggacgcgagaagtccttcacgacgcgtgaccgctcggtgttgtcgcggcggctgccggcgagcaggccccgcgccagcgggctgtagggaatgactccgacgccctgatcgagacagagaggaatcatctcccgctcctcctcgcgatagagaagattatacttgttctgcatggtgacgaatttcgtcagaccgttggcttgggcaagtgcctgcaacttggcgaactggaacgcgtgcatgctcgacgcgccgatgtgtagcgccttgccggcacgcaccaccgcatcgagcccctcgaggatctcctcgtaaggcgtcagcggatcgagacgatggatctgatagaggtcgacatagtcggtgccgaggcggcgcaggctgtcgtcgatcgcatgtcgaatgtgcttgcgcgacaggcctccctgattggcgccggctcccattggaaagaacaccttggtggcgagcacgacctgttcccggcctgcggcgaaacgctttacggcacgcccgaggatctcttcgctcagaccggatgaatacgagtcggcggtatcgaagaaggtaaagccggactcgaaggcgcgacgatagtgatcttgtgcctgctcctcgttcagcgcccacggcatccagtccttcgatccatagcttgaacacccgaaggcaattcgcgacacctggattcccgtgttcgcgagcgttccgtatttcatctgcatatccttcactgtcgcacggcgctttacgagacgggtcatcgctcacggccgcaaactatggaataacttgtctgccgaaatggtctagcttgcccgcactgcaaggggacggtcgcaagcgtgatcaccgcccgtagcgtaatagggcatggccatgtcagtcgagtcgatcgaaaccgttgttgatatgcaaccggcagacaaggtcagccgcacaccgctgcgctcgctcgctgcaaagctcccgtggatcgtgatcgttcagatcctggtggtcgccgcgatcttgctggctgtacagctcgcggtcgatagcggtgcagtgaaacgaatctatctggcgtccccgacgcagattcttgctgctttccctcagctcgtcaccagggagaatctgctgtttcacctctccgtgacactcgccgaagcgggagttggcgtggcgctcagcgcaatcctcggcattgcgaccggcatcgccatggggctattcccgaaggtacatcggtttctcaacccgttcctgatctggttcatggcgatcccgaaggtcaccatcattccgcttctcaccctgtatctgggcctcggcttcgagcacaaggtgttcatcatcttcctgttttgctacttcctgttcgtcttcaacacgattgccggcatcaagcaggtccaggacaatcatatcaaggtcgcgcgcgcgctcggggcgagccagcgtcagatcatctggaaagtggtgctgccgtccgccacaccgtcgatcatggctgcggtccgcatcgaggcggcgacctgcctgctcgcgactctttttgccgagatcgtcgcctccaaggccggcgtcggtaatctgctcaacaagttgtcgggcatctacgacaccgccggtgtctttgctctcgtgattctcgtgacgtcgatcgcattgctgatcatctatctggtggatctgctcgagcggcgtgtcttgctcaagtggaaatacgtctgaccggtcccggttccgcgtcttcccgtcactactcgttcgaagggatcgatcatgctctccacaagccttccagctcgtctgttcgtcttggccgcgctcacgctcggcctcaccgcggcggccggcgcgcaggagaagaaaaccctcaagctgcaggacaccacgagttacacgcagcagccgatcgtattcggcgtggagaaggggttcttcgccgaggaaggcttgaacgtcgagttcgtcggaacgcaggatccggtcaccgccacctcgcgcggcgacgtgaccttcgccttcggaccgaccagcgtctatctgcgggctgccgccttgggggcgccgatcaagatcgtcgccgccgccttccgctcgaagggaccgtatttcctgatcgcgcggaaaggcatcaagtcgttcgcggatctgaagggtaagacggtcggcgtcggacccgacaccagcggcaacctcgcgtcggttgcccggtatctgctgcgggccgaaggcatcgatcccaaccgcgacgtgacgctgtttgccgccggcgcgaccgaaaaggcctacggcgcgctcgaaaccggccaggtcgacgccaccatcatccatcagcccttcgcggcgctcggggagatcgagggagtctcgaccacgcttgcacgggcctgggattatctcccgacctatcacaccggcgtcctgatcgcgggcgacgcggtgatcgccggggatcccgatctgctgcggcggggcctgcgggcctacttcaagtcctatacctacgccaaggcgcattacgacgagtacctgccctggctgcaggcccgcctgaagatcaatccggaggcggtgaagcgcgcgatctaccaggaggacgacgtctgggacgccaatccggcgatcgatccgaaggcgatccacgacacgcagcagctggagatcgatgtcggtaaccagaaggagttctacgccgccgccaaatacatcgatgagcgcttcatcccgcaggagtacgtgaagccgttcgtctatcccgggcgcaagacgcagtgagcgagagcaagcgggagcgcgaggggatgcctgccttcaccatcaggtctctcgacaaggtctatcccggcacgccgccggtgcgtgcgctcagcaacatcagcttctcggtcgaggagggcgagttcatcgtgctgctcggtgcaagcggctgcggcaagagcacgctgctggaaatcctcgccgggctgcagcagccgagcagcggctcggtgctatttcgcagcaagccgatcgacggtcccggtggagagctcggcgtcgtgttccaggatgcctcgctctatccgtggcgaacggttgcggccaatgtcggcctcgggctcgaattgcgcggggtggacaagccacaagcccgccgcctggtcgatgagcatctcacgctggtcgggctcgacggcttcggcggcaaattcccgcaccagatctccggcggcatgaagcaacgcgccggcatcgcgcgtgcgctcgtcaatgatcccgacgtcctcctgatggatgagccgttcggcgcggtcgactacgtcacccgcaacaggttgcaggaagacctgatccggatctggcagcagcgccgcaagaccatcgtgttcgtgacgcacgacgtcggcgaggcggtgtttcttgccgaccgtatcgtgctgctttcgccgcggcccgggcggattgctgaaatcgtcaccctcgatctgccgcgcccgcgtcggcggggcgacatcgagcttctgcaacgcgaagcccgcatctatgacgcactccgcgcgctcgagccggccgcgacggcaaccgtggcctgacagacggagaccagaatggccaaaccgctccacctcggctttctctatgcgccgcaatccgggcaccagacgcacgccgaaagcttcgatcccctgaaccccctcgacctgactgccttcgcgcgggacctcgagggggccggctacgcgtttctcctgatcgacgacagcgtcggtcgtgcggaggatgtgcgcagcgaagcgttcaccacggcgtccttcctcgcgaccaggacgcgtcgcatcggcctgatcgctgcggccaacacgagctatgtcgagccgtataacgtgtcgcggctcgctgcttcgctcgatcatgtcacgcgagggcgtgccggctggctggcctcgaccggcgcggccgatcccgccggcgcaaactacgggcaggccgccttcgcgcctgatgtccattatgtgcgtgccgatgaaatcctcgagattgcgcgccggctctgggacagctgggaggatgatgcattcattcgcgacaaacagagcggagtgttcgtcgatggcgccaagatccatccgatcgatcacgtcggtgcatccttcaaggtcaagggcccgctgaacgttgcacggccgccccagggccaggtcatcgttgctcatcgcgtggtggacaagcggtcggccgacttcgcggggcggcacgccgacatcgccatcctggggacggcgacgacagggagcgccgtggccctgcgcgaccacgtgcttgcttctgcgcggggcgccggtcgtgatacgcaggatctgcggctgtttgccgagatcgtgcccgtcagtgcgtcggaccacgcggcagggacgccgcaaccgtacgctgccaatcatgtggcaggttcgccggcggagatcgccgaccagatcgaggcactggcacatgccgtgacgctggatggtctggtggtcgtgccgcggattctccgcagcggcctggatgacttttcccgggatgtcgtcccggagctggtgcggcggcaacggctacgatccactgagggatcggtcatcctgcgcgaaagactcggtctggcaaggccgcgcaatgtgttcgaacagccctcaaagcagccggccgacacggccgcctgaaccatcccgcgagcgtttcaccatgtccaagcgagaacttcatttcggcctgatgttttgggccgggggcacacatcccagcggctggcgttatccttcctcccacgcaggcgccgccttcgacatcgaattccttcagcgggtcacccagctcgtggaagcggccaagttcgactttctgttccttggcgaccggctggcgagcgatccgagcctgcaaagcaccaatccctcccagatgtcacgcctcgaaccgttcgtgtccggggcgagcctggccgccgcgaccagccatatcggtatcgtcgtcaccgccaatccgacctattacgatccctataatcttgcgcgcatgctggcgtcgctggatcacctgagccagggccgggcgtcgtggaatctggtgaccggcgcggatgaaatcgccgccggcaatttctcgcgccagtcccattgggacaccgagcggcgctacgattgggcggatgaattcgtcgctgtggtgcggggactttgggacagcgatgcgaccacgccgctgcaccacaagggacgctatttcgacgtcgccggaccgctcaacgtcaggcgcccgccccagggccatccggtgatcctgcatgccggtacgtcggatcgttcgcgtgagctcggcgcgcgcgatgccgatgtcatcttcgccggccaggcgacgatcgagagcgcgaaggcctactatgccgatgtcaaatccagggccaggaagtatggcaggagcgacgccgatatcgcgatcctgcccgggctcacgcccgtcgtcgccgagacgacgcagcaggcggttgcgatattcgaccatctcaattccttcattgcgctggagcccgagggcgatggcggcgaggcaagccgctacggttcgctgggcaggatggggaagcgccgcaacctcacggcggtatcggcggcgatcggcgtcgacgtctccagccaggaccgggattcaccggtcgaccccttggtgctggcagaggccaacgagggcggccaacggctgtttgccgatgtcatgcgtctcactcgccgcgacgtgaaaggccccaatcgcctgacctatcgcgatctcatcatcggacacatcagcacgggcgccgtcgtcgtcggcgatcccaacgaggtggccgatcacatcgagctttggtttgacgagagggcggccgacggtttcaatattttcccgccttatgtgccggaatctgtcgaggccttcaccagcctcgtcgtccccgaattgcagcggcgcggcctctatcgcaccgaatattccggttcgacctttcgcgaccatctgggcctggcaaagcccgcgccgatccgttccaacagctccaacctttgaggtcggatagccgccctccgcacgcccaagccgggccaaggcctcccggagtgcggtgagcgatcttgcggagcgccggcggtcagcggcacccgcgcaaggatgccccgaaccgggggcccgacggctcggattcccgcgacccagcgccggctccgccggcagtggcgtgcactcaaccctgttctccgtacttatacggatacgaaagtggcggattgcggcgccggactcggctaagcaactgggtgcaagccacccgatattgccccggcgccgacaatacctttcctgctcctgttttccttttccattttccggtgcaactgctcacgatgagttggtcgggatgaatttgtcgggccgtctggcggtcgggatgatgtttcccgtcgtcacactcctgctcacgctgggcttcatccatggcgtcacctggccgggcatggcgctcgccggcggcgcggttgcggtggtgttgatgactgctgagctgattgcgagatcgctggccacgacgcccgcccagttggtgcgggcggcggacgcgctgtcgcgcggcgagccggtctcgatacgtccgagtggcaatgacgaggccgcccagctcgccgcgacgctggccgagctgtcggcgcaattgggcagcaggcagcacctgctggagaagaccgtcgagagcatccgcgatcccgtggtggtcgccgacgagcacgcgatgatcgtgatcgtcaatgcggcggcgcggcggctgtacggtgtcgagcccggttttgacacgctgaccggcgttcgcaattttcagaactattatgccgatggtacgaccgagatgccgatcgcggacacaccaatggcgcgtgcgctgcgcggcgaggacatcgacgattgcgaactgatcgtcaaacccctgcggcccgaaccggccgtctatctcgtcgtcaacgccaggccgttgcgtgacgatggcggcaacctgcgcggggcggtcatcgtgctgcacgatgtcaccgcgcagcgtcaggcgcaccaggcgctggtggaaagcgagcagatggcgcaggccatcgtcaggaccgcgctcgatgccttcgtgcagaccgaccaggacggcatcatcctggactggagcccgcaggccgaggcactcaccggctggacgcgctccgaggcggtcggctgtcgcgtcgtcgaactggtatttccggaggagcttcgcgtcgcgcatcgacagcgcatcacccgcttcctgcaggaggccgcgggcggcggcatggggatgcgctatgagaccgcgtccgtgcaccgcgacggccaccgcttccatgtcgaggtgtcgctcaatgcgctgcgccgcggcgatggctggatcatcaattcctttgtcagggacgtcacccagcgccgcatcgccgaagagcagttgattcaggcgcagaagacggaatcgcttgggcggctgaccggcggcatcgcgcatgacttcaacaacatgctgacggtgatcaccggcacggtcgagatcctggccgatggggtcaaggacaacccgcagcttgccgcgatcgccaagctgatcagcgatgccgccgatcgcggcgcgcagctcacctcgagcctgctggcgttcgcgcgcaagcagccgctgcagcccgccgagaccgacgtcaacgacctgatcggcgaagtggtccgcctgttgtcgcagacgctgggatcgcagaccgagatcaggacggagctcaaccgcaacgcctggctcgccttcgtcgatcgcagccagctcggcgccgcgctggtcaatctcgccatcaacgcgcgcgatgcgatgcccgagggcggcacgctgtcgtttgcgacccgcaacatccagctcgggattcccgacgccgtggcgcacggcgtcgagcgcgccggcgaccacctcgtgatcgaggtcgccgacaccggcaccgggatttcgccgtcgcatctggagaagatcttcgatccgttcttctccacaaaggaggtcgggcagggcaccgggctcgggctcagcatggtgttcggcttcgtcaagcagagcggcggcgggatcgaggtcaggagcgagcagggccgcggaaccatcttcaggatctacctgcccaaggcggacggcatcgcgcagcgcgcggccgaggaggatgatctgccggtcaggggcggcgacgagaccatcctttgcgtggaggacgaccccacgatccgcgactacgtcacgggccagctcgaaagcctcggatacagggtgctggcggcggcgaacgcggatgccgcgctcgagatcgtcaaccgcggcaccgtgttcgatctcctgttcaccgacatcgtgatgcccggcagcatgaacggccggcaactggcggaaacgctgatggccggtcgcccggcgttgcgggtgttgttcacctcgggctacagcgatggggtcctgccggcgcaacaggggcgcgggggccacggcattccgctgctgaccaagccctatcggcgcagcgaactggcgcgggtgctgcgacgctgccttgatcttcaggtcgacttccagggcgacccggttccgcagccctactccgtgcagcccgatctcgaacgcttcctgcgcgagaatccgccggaaaagagctaggatgggaacgcgctgacaagcgcgagcgggcgcgcgtacgtcgcgcaccgggatccacaaccagctgcgcaaccaacgcgttcgccgggagaagcctgcagtgaccatcacgattaccgcctttgagcggtcgcccgacggcggcaagggactggcgcgggatacgcgggttcgctgggcgcttgaggaggtcgggcaaccctacgcggttcgcctggtttcgtttgcggcgatgaaagagccggcacatatggcgcttcacccgttcggccagataccgacctatcaagaggacgatctcgtcctgttcgagacaggggcgatcgtgttccaccttgccgagcgccatgccggcctgctgcccggtgacgccaatgcccggtcgcgcgcaattgcctggatgttcgccgcgctcaacacggtggagccgccgatcctcgagttcgcgactgcaaggctgttcgagcgcgaccggccgtggcatgcggaacgcctgccgctggtcgaggatcgtgtccgccagcggctcgaccagttgtcggatcgtctgggcgatgccgactggctcgacggcgcgttcagcgccggcgacctgatgatggtgtcggtgctgctccggctcaaaccttcgggcatgctcgacgggcatccgaagcttgcggcgtacgtcgcccgcggcgaatcgcggcccgcctacaagcgggcctttgcagctcagttggcggtcaatcatccgcaagtcgcgggctgaccgaggcagtccgtaggatgggtagagcgcagcgaaacccatcatctctcatgcggtccgccgtttgacgggtatcggttcgctccaccatcctacttggcgcaagttcgacgcgaggtatgcacagtgcaggaccacaccatgatcgcgatcttcgatggccacaatgacgcggctcaacagctcgccgagtaccgggaaggcggccgggactttctggtgcgctcggaggaagggcatctcgatctgccgcgtgcccgggaaggcggcatggtcggcggcttgtttgcgatgtacgccaaggcggagcatccgcgacagggcgatttcacgcgaaccgccgacgggtacgaggtgcgccttgccgagccgctcgatgcggcctatgcgcgccgcaccatcgatgcccagctgagcgggctggatgccatgatggcccgcgccgacggaaagatccgacgcgtgacaaccgtggatgagatcgaggcggcacggcgggacgcggtgttttcgatcgtgctgcacctcgaaggcgccgaagcgatcgacgccgatctcgacgggctggcacggctctattcccgcggcctgcggtcgctcggcccggtctggagccgacccaacatcttcggccatggcgtgccgttcgcctatccgcgctctccggataccggtcccggcctgaccgacgccggcaaggcgctggtgaaggcctgcaacgaactcggaatcatgctcgatgcagcccacctcaacgagcgcggtttctgggatctcgtggcactcagcacggctccgatcgtggtcacccacgcctgcgcgcatgcggtctgccccgcgacccgcaacctgaccgaccggcagctcgatgccgtcaaagcatcgggcggcgtcgtgggcttcaatttcagtgtgtccgaggtgcgcccggacgggcacagcgatcccgacgccccgatcgagacggtcgccgaccatctcggctatctggtcgagcggatgggcgacgaccacgtcgcgctggggtccgacttcgacggtgcggtgatgccgcgtccgctcagggatgcaagccatctccagaacctgatccaggcattgcgcgggcgcggtttcgacgacgccacgctgcgcaagatcggctttgacaactggatgcgggtgctgcgccgaagctggcggtgatcggtccgtaggacgggtatcgcttcgctccacccatcctacgcgctatgctcccttgacaatcgagcggccggccaacggcccgctttcagggagtagatggatgcaggaccgcaaatggtcgcgacgcgactggctcaagctgacgacggccaccgccgccgggatggtgttcgccgaaccgctgcgggcggggccgccgccggctgaggccgtgacgccggagctgatcgcggcggccaagaaggaaggcaaaatctcgtactacagcgcgctcgaactgaacacggcggagcgcctggcgcgcgacttcgagcagaaatatccggggatcagcgtccgcgtcgagcgctcaggcgccgaacgcatcttccagcgcatcgcccaggagcagggcagcggcatccacgccgtcgatgtcgccaactccaccgatcccgcgcactacctcgactggaagaagaacgactggctcgcggcctacgtgccggaatccgtcgcaaagcattttcccgccgaccagatcgatcccgacggcacgtcggcgacctcctgcgcctggttcgaggtgatcggctacaacaccgagcaggtaaagcgcgaggacgcgccgaagagctatgccgacctgctcgatccgaaatggcgtggcaagatcgtcaaggggcacccgggctactccggcgcgatcctgaccgcaaccttcgtgctggcgcgcgatctcggctggccgtacctggagaagctgtcgcagcagcgggtgatgcaggtgcagtcggccgccgatccgccgaagaagatcctgctcggcgagcgcgccgtcatggccgacggcaacgactacaacctcgtgctggccaaggaccagggcaagccggtcgaggtggtctatccgaccgagggcgcgccgctgatcatcgtgccgagcggcatcttcaagagcgcgccgaacccgaacgcggcgcggctgttccagagctatttcttcagcgccgaaacccagcagatgctggctgacgaattcgcgcaccgctcgttccacgccggggtgaaggagaaggccggccacgtgccgctcgacaagctgaaggtgctcagggccgatcccgcccaggtgcaggagcagagcgaggagatcaaggcgcgctacgcgaaactgtttcgggtgtaggcgcgtcgcggtcggtaggatgggtagagcggagcgaaacccatcatttgcgcgtggttcgacatgatgggtttcactccgctctaaccatcctacgcgctcctcatccgacgcggctacgccgcgcgaattgatcgctgcgcgcggtaggcttgcggcgacagcagcgtcagctttcggaaggctttgcggaagctgctctcgtcctcatagccggtggcgcgggcgatcgccttgatcggttgcgccgtggtctccagcagcgtgcgggcgtgctcgacgcggcgtcgcgtgatgaaggcttgcggcggctcgtgggtcaattcgcggaaacggcggttcaacgtgcgttcgctcaggcccagcgcctgcgcgaggccccgcaccgtgatcggcgccttgccggtgcggcgaaccagcatgtccgctttcatcagcagcgggtcctgcgcgagcatgtagccgagcggcatgaagatcgcctgggtgcgttgcgcggtgtcgatcacggcgtagtcggcgcagactttcgcgacctcggcgccttcgaccagctcgatcaaccgcagcagcaggtcgacccatgacatcgggccggcggcacagaccaggcgatcggcctgggtgatgacggcgtcgctggcgaggtcgatcctgggatggcggcggcggagctcgctctgcagccaccaggtgatggtggcgcggcggccgtcgagcagcccggcattggcgagcagcagcacgccgctgcagaaagcgccgatcagccggccgctggcatgctgctggcgcagccaggcgccggcacggtcatattgcggttgcaggcgctcggcagtgaggtgatcgaccaggctgcccggcacgatgattgcgtcgaatgcggcccgcttgctgatggcaccgtcgaccgcaacgagctttccgccgccggcgcgcaccgccttgccgtcgagcgagagcgtctgccagctgaagcacgccttgccgccgcgcagcgccatcacatggttgccgagcgtgaggatgtcggcgatgccggcgaccgccgattgcatgcaggcttccagcgcgagtatcgcaagcttcatggggacctcctgatgttgccggcatcctacctgatcggcgcgatcaggccatggcggatattgcccgatctctgtctgatcggccactgcctctttgggtcatgcaggtccaccttcgctgcgttgtcaccacctcagcaatggagagagaccatgccttacgtcaccatttccaccgtccgcggcatcttcgacgtcgcgcagaagaaggcgctgctcgagcgcgtcaccgatctcatggtcgaggtcgagggccagggcgacccggacttccgccgcaacgtctgggtcaagatcgaggagggcgagccggcgagctggtcgctcggcggcatgatgccgacgccggacctgatcgcgggcaagttcggcgcgctcgatgccggggggcggcgggtcgcgaaggcgaaggtgtaagcgaagaagaggcgttttcgccacatcgtcattgcgagcgaagcgaagcaatccatctctccgtatgcgcggacgtatggattgcttcgtcgcttcgctcctcgcaatgacagatgccccaaaaacaaaaggcgcttccatcggaagcgcctttcgcgtgtgttcagtgctgctagcttacagcgagtagtacatctcgaactcgaccgggtgcggggtcatttcgaaacgggcgacctcggtcatcttcagttcgatataggcgtcgatgaagtcgtcgtcgaacacgccgccgttcttgaggaatgcgcgatccttgtcgaggctctcgagcgcttcgcgcaagctgccgcagacggtcgggatctgcttcagttcttccttcggcagatcgtagaggtccttgtccatcgccgggcccggatcgatcttgttcttgatgccgtcgaggccggccatcagcatcgcggcgaagccgagatagggattggccatcggatcggggaaacgcacctcgacgcgcttggccttcgggttcgcggtgtaggggatgcggcaggatgccgaacggttgcgcgcggagtaggcgagcagcaccggagcttcatagcccgggaccagacgcttgtaggagttggtcgacgggttggtgaaggcgttgatcgccttggcgtgcttgatgatgccgccgatgtagtgcaggcaggtctccgacaggtcggcgtacttgttgccggcgaaggtcggcttgccgtccttccagatcgactggtggacgtgcatgcccgagccgttatcgccatagaccggcttcggcatgaaggtggcggtcttgccgtagatgtgcgcgacctggtggatgcagtacttgtagacctgcatctggtcggccatcagcgtcagcgtgtcgaacttcatgccgagctcgtgctgggcggaggcgacctcgtggtgatgcttctcgaccttgacgcccatcttggccatcgcgccgagcatctcggagcgcatgtcctgcaccgagtcctgcggcggcaccgggaagtagccggccttggtgcggatgcggtgaccgaggttgccgccctcatattcggtcgaggagttgatcggcagctcggaggagtcgaggcggaagccggtgttgtaggggtcggccgaatagcgcacgtcgtcgaacacgaagaactcggcctcggggccgacgaatacggtgtcgcccacgcccatcgacttcaccatcgcctcggccttcttggcgatgccgcggggatcgcggttgtagggctcgccggtggtcggctcgagcacgtcgcaggtgatgaccatggtggtctcggcgaagaacgggtcgatcgtcgcggtgaccgggtcgggcatcaggcacatgtcggattcattgatcgccttccagccggcgatcgacgatccgtcgaacatcgtgccctcggcgaagatgtcgtcatcgatcatgctgacgtcgaaggtcacgtgctgccacttgccgcgcggatcggtgaagcgcaggtcgacgtatttgacgtcgttgtccttgatcgatttcaggacgtctttggcggtcttcatgaataccccttatggatgtgcgggtgtgtttccggcggtgggcgacgttattcccgcttttggcgggttcgtgtgactactcaaacgaaatcaggctgccgaagcagccttttttctcttttgcgtcagaaattccggatagcaccgcccttaaatagcgtccagcccggattcgccggtccggatgcggatggcctcctcgatgttggagacgaagatctttccgtcgccgatccgtccggtctgggcggcgcgccggatcgcgtcgatcgccttctcgaccagatcgtcgccgatcacgatctcgatctttaccttgggcaggaagtcgacgatgtattccgcaccgcgatacagttcggcatggcccttctggcggccaaatcccttggcctcggttacggtgatgccttgcagtccgacttcctggagcgcttctttcacctcgtcgagcttgaagggcttgatgatggcttcaatcttcttcactgagcgcctcccgggcattgcagattgcagggtcaagttcgatgcgcgtggggcgcagtctggttggtcttaagccttccggcggctagccggaagcacgcgcaatggtcgcatcgggcggccttgtgcgcggcttcctcaaaagcagggtctatgccaagttgttaaggtccccgatttcggaatgttatcagccttttaacaggcaatcggctgatatcgaaccaagtgggctatgatagctaagcctaacaaataggcaaatagatcaatccatatgcagacggccagtagaaaccccgcgaacgttacaggaattgcctctcgaaaaggcgaagcgattgaggattcggcatggacgttctgaccaccaccgagatggagcgtgccgatcggctgaccatcgcagccggcacgccgggcttcgcgttgatgatgagcgccggccaggccgtcgctgaagccgcgatggacctggtcgaggaggggccgatcgtcgtggtcgccggccgcggcaacaatggcggcgatggctttgtcgccgccgccgagctcgccgcgcgcggccgcgaggtctcggtgatcctgctttgcgagcgcgacagcctgcagggcgatgcggcgctggcggcgaagggctggaaatatccggtgctgccgttcaacccgcaggcgctcggcaagccggcgctgatcatcgacgcgctgttcggcgccgggctcaatcgcccggtgaagggcgacccgctggagatgatcgatgcgatcaacgccagcggtacgccggtgctggcggtcgatctgccgagcggcatcaacggcacatcgggcgctgtcatgggggccgccgtgcaggcgaccgaaaccgtcaccttcttccgcaagaagcccgcgcatctgctgctgccgggccgaatgtattgcggtcgggtgcgcgtagccgatatcggcatcgacgcgcaggtgctcgacgagatcaagccgctgatcgcggagaacctgccgcaggcctggcgctggtcgtttccggtgccgcggatcgacggccacaaatatgcgagggggcatgccgtcgtggtctccggcgatctcgcctcgaccggtgcggcgcggcttgccgcgcgcgccgcactgcgcgctggagccggcctcgtgacgctggcctcgccgcgcgatgcgcttgccgtcaacgcggcggcgttgaccgcggtgatggtgcgcgcggtcgataacccgatccagttcgccgagttgctcgacgacaagcgcctcaatgcctgcgtgatcggccccggcgccggcgtcagcgcgcgcacccgcgacttcgttcacaccgcgctctcggcgcggcggcatctggtgctcgacgccgacgccctgaccagctttgccggttcgccggaccggctgttcgaggcgatcaaggcggccgaagggctcggcgtggtgctgaccccgcatgagggcgagtttccgcggctgttcagcgatatctccaacaagcatcccggccgctccaagctcgagcgggtgcgcgcggcggccgagcgctccggcgcggtggtgctgctgaagggcgccgacacggtgatcgcatctccggatgggcgcgccaccatcgccgccaacgcgccgccctggcttgccaccgccggcgccggcgacgtgctcgccggcatcattgcgggcttcctggcgcagggcgtcgccgctttcgaggcggccagcatcggcgtgtggctgcacggcgaaggcgccggcgaggcggggcccggcctgatcgcggaggatttgaccgaggtgctgcctgcggtgttccgccgtctctatgatgagttcgggattgagtattaggcggctcgcgcttgcggacatggacgccgccgcgcgcgtgcatcgtgcgtcgttcgatcacgcactgccctggctcgtcggcctgcacacgcccgacgaagaccgctggttctatcgagagcagatgtttgcggcctgcacattgtggggcgcgttcgatggcgagacgatgtctggcgtgatcgcgttccgcgacgattggatcgagcagctctacgtgctgccggatgcacagggccgcggcatcggcggcgcgctgcttgcgatcgcgcagcaagccgtcgaccggctgcaactctggaccttccagcgcaacgcacgggcgcgaagcttctacgaggcgcgcagctttgtcgtcgtcgagcggaccgatggcagccgcaacgaggagaaggaaccggacgtgcgctatctctggacgcgagtagccgcgagctagtttcaagaggggccggtccgccttgctatgacggaccgccgcggcgactggtgctgctcaggcaatgtcggtggagagcgagacgctcttccacgcagcgaattcggcctgcagcagcttcatcttgtcctcgaccagccgcaccgcatcgctgccgagcagcaggtgcgccggcggatcggccgacagtgcgagttttagcatggcctgcgcggccttctggggatcgccaacctgccggccgctcatttccaggcggcgtttgcggatcgggtcaatgagagcgtcatagtctgcgatcgatcgttccgcccgtaccatcgatcgcccagcccagtcggtgcggaagctgccgggctcgaccgccgtgaccttgatgccgaggtcattgacctccttgccgagggtttcggagatcccttccagcgcgaacttgctgccgtgatagtagccgagaccgggcatcgtgatgaacccgcccatcgacgtgacgttgaggatatgcccggcgcggcgtttgcgcatgaagggcagcaccgcctggatcatcgccaccgcgccgaagacgttgacctcgaactggcgtcgcagatcgtcgatcgatgattcctccaggatgccctcgtgaccatagccggcattgttcaccagaacgccgatcgcgccgatcgtgcgctcgacgtcggcgacggcgggcgcgatggccccgaagtcggtcacatcaaggattaccgcgtgcacgccttcgccgagcgcctcgaacttctgcttgtcgttctcgttgcgcacggtgccgacgacggtatggccatcgctcaatgctgcctcggccaacgcgcggccgaagccggacgaaacgcccgtgatgaggaatgtctttggcatagggaatgtcctttgttcaggttgccgatccagattgcgggctcgatatagtcgacttgattagtgcaataatcagcataaagtggcatgacctgatgcaggtaatcgtacaatgcagcatgctggccttttcgagctgaacgcggtcgtcgcgatctcgacgcatcgcagctttcgcgccgccgcgaccgagctcggcatttcgccctcggcgctcagtcatgcgatcgccgcgctggagaagaagctgggcgtgcgtctcatcaaccggacgacacgcagcgtcgcgctgtcggaggcgggcgagcgcttcctcgccagggtcagtcccgcgctgcgcgagattgccggcgccatggaggacgtgaacgagttccgcgacactcccgcaggaacgctgcgcatcaacctgaaggagcgcgccgcgcaccagatcctccgtcccgtcgtcgcaaagtttctgcggcactatcccgacatgaacgtcgaattgacgctggagggccggcccatcgatatcgtcgcggagggctttgatgccggcatccggctggctgaagccgtgccgcaagacatggtcgcgattccctgcggcccggacacgcgcttcatcgtcgttggcgcgcccggctatttcgcgcgcgcgttggtgccgcggtctccgcttgatctgctcacccatgaatgcattcgcaggcggatgcccagcggcaagatctatcactgggaattcgagaagcgcggcggcgagcagatggcggtggatgtcccgggcaggctgaccctcgacaatgacgccttgatggtcgaatccgcggtcgaaggcctgggactggcgttcatcagtgatttctgggtcacgggacatctcgccgccggaacgttacgatccgtgctggacgactggacgccgccattccccggcttgcgcctctattatccgcggcatcggcacatgacggccgggctccgagctttcgtcgacatgatacgggcggagacgaagttggccgccaaggggggcggggttcacgcagacccggccaagcgaccgcacgatcgtcgcaaacgggtttgaactgcccgacgcccgtactagagcgcgtcagggcgagccgtacgtgacgatctatcgcgcgattgttgctgaggacgtcggcgctgcgctcagctgcgcgcgtttggcgacaacgcaggccgattcattccgcggctgaaatcagcggggactggttcacgcgcgtctcgcccttcagattgtcgacggtgacgtacgtgtcgtaccaggtcagccgcggccgggctccgaagcgttcggtgagctcggcgatcttggcctcggtaaaccatgcctcggctgcctcccggctctcccacaaatagacgccgccggtgccggcttctccgttgagatagtctttgcggatcagcccctttgttgcgaggtttcgataaatgggggcggtgcccatgccgcccttgatggcctgttcttcagttcgcttcggaaggtcgaattgaacgacgacgatacactgtgccatcccggttctccgatctgagtctacgcggtgtcaggttcgctcggcggcacgccgatctggtcgaacaatacagtatgcagcccgcgcttgtcccgatctacgcagagtgcgcccggtggagtagcgcttgacatttaagacgaccggtcatattggtcgttcaggagatcagagcatggcgaggccgagcgtccgggaacaattgatcgaggcggggttgcagaccctgcaccgccatggcttcaacggcaccggagttcaggacatcacggttgccgccggggtgccgaagggatcgttctacaatcacttcgagagcaaggaagctttggcgctggaggcgctggagcggtattggcagaacggcgccgctcggcgcgtacagctaagcgacacaagtgtcgaccctgtggagcggcttcgtcgcttctttcgtggcttgtcggacctcgccatccgtcagaatttccaaacgggatgcatgatcgggaacttcagtgcagagctctctgtgcagagcaacgaggtccgcgatcgtctcgccgagatctacgccgcctggagccgcgcgatcgaatcctgcgtgcgcgaggccgagaaagccggccgcgtccagccgcgtctgcccgccgccaccattgcgacattcctggtcaatgcctgggagggcgctgtgctcaggtccaaggtcgaacaggacaagtcgccgttcgatcagttcgagcgcttggtattcgcaagcatcttcgcctgagccgtcgagagccaaaggtaccaaagagccaccggcatcaacttgttttgcgactaagatgaccggtcatattggagagagaaaatgaagctttcaacttcgttccagcttggagcctttcggctcgcgcaccgtgttgtgatgccgccgttgaccaggatgcgatcagccaacggcgtgccgtcgccgctcgccgcgacctattacggtcagcgcgcgaccgaaggcgggctgatcatcgccgaagcgacccagatttcccagcaagggcagggctatccgcggacgccgggaatctacacggaggaccagatcgcgggttggcgcaccgtcgtcgacgcagtcaaggagcgaggcggagtgatcttcctgcagctgtggcacgtgggaaggatttcgcactcctcgtttcaaaaggacggagccgttcctgtcgcgccgtctgcgatccggccggcaggcaatgctttcaagagcgattttcagcgcgcgccttatgagacgccccgcgcgctcgagttgagcgaaatcgtgcagattgtcgccgactaccgcaaggccgcggagaacgccaagcgggccgggttcgacggcatcgagattcatgccgccaacggttatctgcttcagcaatttctggaggacaagaccaatcaccgcaccgaccgctatggcggctcgatcgagaaccgcgcccgtctgctgtttgaagtcctcgatgcagtctcggacgtgtggccggccgatcgcatcggcgttcggctgtcgccgttcagcagcgtcggcgatgtcgcggacagtgacccgatgtctctgtacacgcacgtcatcaagcaactggccgcacgtcagatcggcttcctgcatttgatcgaggctcgggtgcgcgccggtctggtggatcagaccgacgacgcagcaccgcaatccgtcgctacgctgttgcgcccgttgtttcccgggccgttcattgtgtcgggaggcttcaccgccgagaccgccgaggaggcgctcgccgcgggcacggcagacctcgtcgcgttcgggcgtgccttcatcgccaatcccgatctgccgaggcgtctcgcgctcggcgcgccgctcaacgcgccggatcgatcgacattctacggcggcgccgagcgcggctacaccgactatccgagcctcgatgaggtcggcgcattcagcgcctgagccgggaaaggcacgagagcgatggacgcggtgacacggaccagtttcgcccaaatgatagcggcgttggagcatcagggatgaacagggcaagagctgggtctcgttcgacgattacgccgtctcgctggtcgacgaacgcgaaaagttcgcgcatgagcgcgcgcttcggcgtcggcggcgagggagagcgacgatgaagctctacgggttcgggccggcggcgagcgcccagcgcgttcgggtcttcttggccgaaaaggggctcgatgtcccgaccgaacaattgaacgtgcgcgacgacgatcagttcgccgcagcgttcacggcgatgaacccgttccactgaagcggagagaaaacggccgaaacagcccaacgcaactctgaccggccgatactcttgcagtgcgagaaacgtcgcgcgatcacacgcggcctgccggctggaactgcttgatcaattgcgcacgaaatagagcggcgtccgcagcgtcagctgataggacggcttcggcacccatatgatttgagccgtgactccgaacaggcgattgtcgttgtcgtccatccgatcgagatcgagccggagaatcggctgggtgaacgaccgaaccggcgtgaaggacaggaactgtgcgccgccgaaatattgcacgccggcgcggccggtgaatttccagttgctcggccactgatagtagccgccgacatagccgatgatgtttggatggattcgggcgagcgcggtcgccacctcgacgcgggtatcctggatacccgccagcatgccccgcgtggcgtccgcgtcgaaggcgtagtcgaactcgagaacgttgttgaaggtcgtcgtcccggtcggcccgttcgggatcgcctgggtgattgtcgattgccaggtgatggtcgggatcgagccgcctttctggctgtagagatctgcctgaaacccgacgttccagctggtgacatcgaacgccgaccagccctgcgcgggtccgtaggtggtcgtgccggagacgccggcatagagcgagacggtatcgctgacatccaccgtcaacgggagatcgacagcgagggattgccgggatggcagggatacgctggtcggaagcgtgccgccattggcaagcgcaagcgactggagcgcgctaaacagcgccggactgccgaagccgaccggcaacgcgccggccggcacggttgcgtaacttgttcgcagatcgagatagatgttaggcgtcgcgtctgccggagcgccgctgtcgtcgttgcgatccttgccgaacgcggctccgctgaagcacaagccgatcagacaggccgcgacaagcctcggaaggaagaggcgcaatgcgacggttgagcggcgagggaaaactggcacggcctccgggctcctcctcgtttacagtcaggcgctagctcaccaggtacttcgccaccgccggctcgttccattcgatgccaagcccgggaccgcgcgcggtcacggcgccgtcgacgatctcggcggaccttgccaggatcgcgccggcgaagtcgaggaattcgagccagtgcgcggtcggcgtcactgcgagcaggtgcgcgctgacttcggcgaacaggtggctcgacatcgggatcgacgccgcgtcggcttgccctgcgacctgcatccagccggtgacgccgccgaccttcatcacgtcgggcatgatgaagtcggaagcgccggccgcgatcgcctcggcgaagccgcgcgggaaccaccaattctcgccggcctggatcggcgtcggcgaggtctcgcggacttttgcgtggccggccaggctctcctgcggcaccggctcctcgatccagtgcaggtcgtagggcgccaggcgtgcgatgcggcgggtcgcttcggccggatcgagcgactggttgaaatcgatcatcagagcgatgtcggggccgagcagggcgcgcacgcctttcacgacgcgttcgtcattggcggcatcaccgtcgccacccttgatcttgatgccgcgaaagccctggtcgagcgagcggcgcagcgcgcgctcatcagtgacgggatcgaccgcgccgtagctgtcataggtcttgatcggcttcgccgagccgccgagcagttcgaccagcggccggccggcaagctgggcgagcacgtcccaataggccatgtcgagaccggacaccgccatgccgaccaggccctgccagcccagcagccgaaacttggcatccatcgccttcatcagatcgaacggcgcgaccggcttgccgatcacctcgcggccgatctcctcgatcagataacaaagcgggtgaagtgtgagcttgctgtaggcgaagatgtaggtgcggccggtaacgccttgatcggtctcgacatcgatcaggaccagcgggccggaatcgatcacgccgaaggcagtcctcacaggacgcttgaggggcaccacgacacctcgcgcctttactccgcggatcgctgcaactgtctggctcatggatgtcccctgcgcgtttcccggaagtttccttcccttgttattggacactgtaccatcggatgagccgcggcgcggcccaatcggccgcaacctgttcgatcaaatagcggccgggatattcggcgaggaaggcgatgcgctgggtctcgcctggttcgaccgcgagcgtgtcgagccagaacggcttccagccgtcgtcgagtcggtcgagcaggcggaagtgatggccgtgcagatgaaagacgctcgcgatcgcgctgcggttggtcagcgccagcacgaccgtccggccggccttggcttgaaaagccggggccgccgacggcttgaaatccgccgggcggaaccactcggttggcgcgccgagcgccaattcgaatcgggcggcactcctgaggtcgagctgggcgggcatgtcgttgcccggcagcggcggagcgggagggaacggcgccgcccggatcggggcttcgttcgagacgatgagcttgccgaccgggcggccctgcttgccgtcgtgcaacaggatcgggaaactggttccggccggaccggccgtatcgacgaagacgtcggttcggcttcccggagccagtatcagcgcaccgttgcgcgccgagaatggttcggctggctggccgtcgatcgccatcaccctgacgtcgagggtctccagcttgaccgccagcacgctgcgtgggctgccattgataaagcggagtctgagccgggcgttggccggtgccgagacttcgtgcgaagtcttgccgttaatcgtatgaattaacgtcgaatctttcggctcggatccgggcgacaccgcggttccgtcgggttgcaggcgccactcctcgatcagcaagacctcgtcacgatccaccgcgacgggcgaggtgccggtcacgatcaacgggcgcgggcgagccggcatggttgtgccatcgccgagcagcggctcgcacaggaaggtaccggcatgccggagcgggagctggaagctatccttggccccggtggcaagcggtgtccgggaggccagtggctccgcggccgggactccgtcaagcccgcggcaatcgagcgcggcggcgaccggcagctcgttgccaaacgtcacatcgagcacctcgccgcgcctgaagcggaggtcgtggctgcccagcgaccagacgggggtgtccggcccgttagggcgaagcgcgattcgatcgatcctagcctgcagcgcgaccgctgtccggccttgccccgagaccgtggccggccaagcggggcaaagcgccgcggcgccgagggcggccatcaggtcgcgccggctgagccaaaattcaggacttgctgtgggccttgccatccggccgatgcggaccattttcaagcgtacctgtccagtcgcgatcggtcgcagggcgggctctcccgcggccatttttttgctgcgaaccggtgggcgcatgttataagcccggccgcccgcggcatcgcggccggactggatgcttttcgcgcgggcgtggcggaactggtagacgcgctggatttaggttccagtgacgaaagttgtgggggttcgagtccctccgcccgcaccaagcgcttacagcgtttgcatgacgaattcttggagaaccttggacctctcgggggacgagggttcgccgaacccacagacgtcaggccgcaaggctcaagcgtcgaacagattgaacactgccacggccgctcgggccgcggcaaaagcggaagaagattgataccatgcaggtcaccgagaccctcaacgagggactgaagcacgaattcaagatcagcgttccggcatccgatctcgatgccaaggcgggcgccaagctggtcgacctcaaggacaaggtccgtctcaacggcttccgtcccggcaaggtgccggtcgcgcatctgaagaagatctacggccgctcggtcatggccgagaccatcgaccagaccatcagcgacaccaaccggcagttgttcgaagatcgcggcttccggcttgccggcgagccgaagatcacgatgccgaccgagaaggaccaggtcgacgagctgctctcgggcaagaccgacctgacctacacggttgcgatcgaggtcgtgccgccgatccagctcgccgatttcaagtcgttctcggtcgagaagccggtggtcgatgtctcagacgccgacgtcgacgacgccatcaagcggatcgccgagggcagccgcccgtacagcgccaagaccgaaggtgcagcggagaaggacgaccgtgtcaccatcagcttcaagggcaccatcaacggtgaggccttcgagggcggcaccggcgagggcatccaggtcgtgatcggtgccggccagttcattccgggcttcgaggagcagctgatcggcatcggcacgggcgagacccgcacgctgaaggtctcgttcccgaagaactacctcaacgacaagctcgccggccagccggccgagttcgagactacagcgacgctgatcgaggtgcccggtgaggccacgatcgacgacgagttcgccaagacgctcggcctcgagtcgctcgacaagctgaaggaagccgcgcgcgagcgcctgaccgccgaattcgccggcgcgacccggcagaaggtcaagcgcgcgctgctcgaccggctcgacgagagccacaaattcgaggcgccgccgtcgcttgtcgccgaagagttcaacctgatgtggaactcgatcaaggccgagatggactcgaccggcaagaccttcgccgacgagaacaccaccgaggatgcggccaaggaagagtaccagaagatcgccgaccgccgcgtccgcctcggcctcgtgctgtcggagatcggcgagaagaacaagatcaccgtgaccgacgatgaggtctcgcgcgccgtgattgagcgcgcgcgccagatgcccggccgcgagaaggaagtctgggattactaccgcagcaacgcccaggcgctggcccagctccgcgccccgatctatgaggacaaggtcgtcgacttcgtgctggagctcgccaacgtgaccgagaagaaggtcaccaaggatgagctgttcaaggatgaagacggcgagaaaactgccgcctgattccggcacctcgcgttaatgatgaaccgcgaaagcgcgcccggcgaggatcccctcgctaggcgtgccgccgcgaatcggcttgaacgtctgcgacctgcccagttggctagtgtcggccttgtcggccggaaattggcccatatctggtttaagccttgagccggccagcctcgagccagtagtcttgagcgagctagttctgggcagagttatgcaccacccctaacccctgggttctttcatgcgcgatcccgttgaaacctacatgaatctcgtgccgatggtcgtcgagcagaccaatcgcggcgaacgcgcctacgacattttctcgcgccttttgaaagagcgcatcatcttcgtcaccggtccggtggaagacggcatgtcgaccttgatcgtcgcgcagctgctgttcctcgaggccgagaatccgaagaaggaaatctcgatgtacatcaactcgccgggtggcgtggtgacgtcgggccttgcgatctacgacacgatgcagttcatccgcccgccggtctcgacgctgtgcaccgggcaggccgcctcgatgggctcgctgctgctggcggccggcgagaaggacatgcgcttcacgctgccgaactcccgcatcatggtgcaccagccctccggcggcttccagggccaggccaccgacatcatgctgcacgcacaggagatcctgaatctcaagaagcgcctcaacgagatctacgtgaagcacaccggccagacctacaaggcgatcgaggacgcgctcgagcgcgacaagttcctcaccgccgaagacgccaaggcgttcggcctcgtcgacaaggtgatcgacaagcgtccggaagatccgtcggccgccaaggccgcctgatctggccggcctcccgggggcgccgatgtgatctccacattggcgcctcacatagccggcaaaagcaggacgagcggagtaccccgcaagtgcctacgctcgggcggcaagttccgctttcgtgctcattaggcggcgtggtaatcccgcaacgttccgtggatttcgatgcgtattccacgtgcgatcgtggaaaatcacggtattgtcacggtcttgagcaggccatccgattagcgaattcttgatagtcgggtgccagcatggttggctgtagtgcatcggctatgatcgcggagattcgaataaaccgtgattgcaacggtcagtattgcgtagggtcttttttggtacggaatttgctctatctacccaagaccccggttttgtgccggattgggtcgatctggcaaacaagatcgaacggcggacggagataatgaatgagtaaggtcggcacgagcgacgccaagaacacgctatactgctcgttctgcggcaagagccagcatgaagttcgcaagctgattgccggaccgactgtcttcatttgcgacgagtgtgtcgaactctgcatggacatcatccgtgaggagaacaaatcctcgctggtgaagtcgcgcgacggcatcccgacgccgaaggaaatctgcaaggtcctggacgactacgtgatcggccagagccatgccaagaaggtgctgtcggttgccgtccacaaccactacaagcggcttaaccatcagaccaagcacaacgacgtcgaactggcgaagtcgaacattctgctgatcggtccgaccggttcgggcaagacgctgctcgcgcagacgctggcccgcatcctcgacgtgccgttcaccatggccgatgcgacgacgctgaccgaagccggctatgtcggcgaggacgtcgagaacatcatcctgaagctgctgcaggccgccgactacaatgtcgagcgcgcgcagcgcggcatcgtctacatcgacgaaatcgacaagatcagccgcaagtcggacaatccctcgatcacccgcgacgtatcaggcgagggcgtccagcaggcgctgctgaagatcatggaaggcacggtggcctcggtcccgccgcagggcggccgcaagcatccgcagcaggagttcctgcaggtggataccaccaacatcctgttcatctgcggcggtgcgttctcgggcctcgagaagatcatctccgcgcgcggccgttcgacctcgatcggcttcgcggcgcaggtgctcgcgccggaggatcgccgtaccggcgagattttccgtcacgtcgagccggaagacctgctgaagtatggcctgatcccggaattcgtcggccgtctgcctgtcgtggcgacgctggaagacctcgacgagacctcgctgaagaagatcctgaccgatccgaagaacgctctggtgaagcagtaccagcggctgttcgagatggagaacatcgagctgaccttcgccgacgaggcgcttggcgcggtcgcccgcaaggcgatcgagcgcaagaccggtgcgcgcggcctgcggtcgatcctggagagcatcctgctcgagaccatgttcgacctcccgggcctggaaggtgtcgaggaagtcgtgatctcgcgcgaagtcgtcgagggcacggcgcgtccgctctacatctacgcggaccgttccgatcgcgccgtcgagagcagcgcgagcgcctgaaggcgcgcattcgacctgtcacaaatgcacggctgccgggcgatccggcggccgtcgctgcgcagcagcagcgatgattttggcattgcagtaaatgcctgtttagcctgaatttccgggcacttctcagacttgacaccccccggcctgatagccacctaatgctatcggtgaaggatctcatgcgctgagattcgtcgctttacgatgcggaataggcggctgctgacggcaatctcgttccggatcaccaaggcaccttgtggcggttgcgcaagcaggcggactgcgagcaagggggcaaaacaaaaggataaggccatgacgacctcaaaaccccggccaacgatcgtccacggcgaaagccattcctatccggtgctgccgctccgcgacatcgtcgtcttcccacacatgatcgtgcctctcttcgtcggtcgcgagaaatcgatccgcgcgctcgaagaggtgatgaagaacgacgcgttgatcatgctcgcgacgcagaagaacgcgtccgatgatgatccggcgcccgattcaatttacgagaccggtacgctcgccagcgtcctgcagctgctgaagctgcccgacggcaccgtcaaggtgctggtcgagggcctcgagcgcgcgcgcgtcgaaaagtattccgaccgcagcgaatattacgaggcgaccgcggtcgcgctcgccgacacggatgccaactcggtcgaagccgaggcgctggcgcgatcggtcgtgtccgacttcgaaagctatgtgaagctgaacaagaagatctccgccgaagtcgtcggcgtggtccaggcgatcaccgatttcgccaagctcggcgataccgttgcctcgcatctcgcggtcaagattgccgatcgacaggcgatactggagacgttgtccgtcacgcagcgcctggagaaggtgctgggcctgatggagagcgagatctcggttctgcaggtcgagaagcgcatccgctcgcgcgtcaagcgccagatggagaagacccagcgcgaatattacctgaacgagcagatgaaggcgatccagaaggagctcggcgacgacgaaggtcgcgacgagctggccgatctggaggagaagatctccaagaccaagctctccaaggaagcacgcgagaaggcccagcacgagctgaagaagctgcgccagatgtcgccgatgtccgcggaagcgaccgtggtgcgcaactatctggattggctgctgtcgatcccgtggggcaagaagtccaaggtcaagaaggacctcgaggccgcgcaggcggtgctggactccgaccactacgggctcgagaaggtcaaggaccgcatcgtcgagtatctcgcggtgcagtcgcgcgccaacaagctgaccggaccgatcctgtgccttgtcggacctcccggcgtcggcaagacctcgctcggcaagtcgatcgcgaaggcgaccggccgcgaattcgtgcgcgtgtcgctcggcggcgtgcgtgacgaagcggagattcgcggtcatcgccgcacctatatcggctcgatgcccggcaagatcatccagtcgatgcggaaggcgaagacctcgaatccgctgttcctgctggacgagatcgacaagatgggcgccgatttccgcggcgatccgtcgtcggcgctgcttgaggtcctggaccccgagcagaactcgaccttcaacgaccactatttggaggtcgattacgacctgtccaacgtgatgttcatcacgacggcgaatacgctgaatattcccggcccgctgatggaccgcatggagatcatccggatcgccggttacacggagaacgagaaggtcgagatcgcgcgcaagcatctgatcccgagcgcgctctccaagcacggtctggactccaaggaatggtcgatcgacgacgcggccttgctgctgatgatccgccgctacacccgcgaagcgggcgtgcgtaacctggagcgtgagctctccacactcgcccgcaaggcggtgaaggagctgatgatctccaagaagaagtcggtgaaggtcaccgaggcgaatatcgaagagttcctcggcgttccgaagtatcgcttcggcgagatcgacgacgaggatcaggtcggtatcgtcaccggtctggcctggaccgatgtcggcggcgagctgttgaccatcgaaggcgtcatgatgcccggcaagggcaagatgacggtcacgggcaatctgcgcgacgtgatgaaggaatcgatctcggcggcggcgtcctacgtccgctcgcgcgcgatcacctacggcatcgagccgccgatgttcgaccggcgcgacatccacgttcacgtgccggagggcgcaaccccgaaggacggtccgtccgccggtgtcgcgatggccaccgcgatcatctcggtcatgaccggcatcccggtccgccacgatgtcgcgatgaccggcgagatcacgctgcgcggtcgcgtgctgccgatcggcggtctgaaggagaagctcctggctgccgcgcgcggcggcatcaagacggtgctgatcccggaggacaacgccaaggatctcacggagatttccgatgcgatcaagggcggcatggagatcatcccggtctcgcggctggatgaggtgatcgccaaggcgctggtccgcgtgccggcaccgatcgtctgggaagaggaggccagcaaggtcgacgtcaagcccgatgcttcggatgaagcctccggcggcctgacggcgcactgaagcaagccacgattgaaatagaaaacggcgccttcgggcgccgttttgtttggtcatcacgaggaggcggcaggcgactactctttcttctcgacgacgagattgccgagcgctccgagcgccatcagcacgctggtgccgaggaacacggcgcgcatgccgatatggccgccgatgaatccgccggccagagggccgatcacctggccggcatattgcgccgagatcgaatagccgagcatgctgccggtgacggcatcaggcacgttgtgccggatcacgctggcgatgcagggcaagaggccgccgagcgcgagccccatcaagaagcgcagcaggatcagctgccagccgctgaccacgaaggcctgcgggatcagcagcagcgccgagacggccagacagatggtgatgatgcgccaatggccgacgcgatcggcgagcttgccgaggtgcgatgacgacaacaggctgccgaacgccgctgccgacatcacgagtcccgcgacgaacgtcacctgcggtgcctcgaccagttgcgccacatagaccgtgatgatcggctcgatcgacatgttggcgatcatcagcagcaggcccgttccccacatcgcaatgatggggcgcttgtccggaaccagcgaccagccgccacgcgccttgctgcctttcgctttcttcgggcgcgcctcctcgcggatcagaaaagtggtgccgaggaaggtgatgaagatgacgctgccgatcaggaagaaggtcgcgcggatgccgatcaggttgggcaggacgccgccgatcaagggcccgaccaagctcccggccatgatgccggccgacagcacgccgatcgcccagccagagcgagctttcggcgtctgcgccgcgaccagcacggtcgagcccgaggcgtagccgccgagcaggccggccaatagccgcaggccgaccagctcgtacacgttgtgcgccatgccgatcagcgacatcgcgatcgccatgccgaggctggcgcggatcagcatcagcttgcggccgtagcggtccgccagccgtccccacagcggcgccgtcaacgccgcgctgaggaaggtggcaccataggcgacgccggaccattgcacgatcgcggcgtgatcgctcacgccgagctgctcgacatagagcggcaggaacggcagcagcagcgtcattcccacgatggtcgtgaacgagccgaacacgcagacaatcaggttgcgtctccagggccccgcatcgagggccgcttcgcgatcgacttccatgttcatgtcagcgcaaaccgatcacagcgaagccgcgcgcccgcaggccgcggcgatcctcgttgagcgaacgcagcaggcggtcgcgggtcgcggtgatgtgggcggcggcctctcgcgcggcagaatccggatcgtcggccttgatgaagccgaggatgcgccggtgctcgcgccaggcctgctcgcgcgacggttcggtccacacttcgagccagcgtgcccgcgacagccgcgtcatggcgccggcgatcgccttcacgatgaagggattgccggagagtcgcgcgatctcgacatggaaatcggtgccgacacggtgccattcctcgcgcggcgcgccggactggcaggcatccagcatctcttcgacgccggcgatatcggccgcgcttgcccgcgcacaggcgaggcggacggccgtcgtctccagtgggatccggaactcggccagcgcctccagctcgccgaggtcgatcggcgcgacgatccagttgcggccgtcacggcggaccagctcctcgccttcgagccgcaccagcgcggcacggatcggcgtgcgcgatccctggaaccggctctccagccagcgttcggtcagccgctcgccggggccgaggtcgaaggacaggatcatctcccggagctggtcgtgaatctggagcatctgcgacatggcgccgtccctcggttaccgtggttaggtatcccagattggtatcccaaacaatccagatttgggataccggcattgtcccggttgggcactgcatcgcgtcgcggcgtcttgcaggctgcaattgggcaaacgacctgttgggcgaccgccttgttgcacgacgccgaattgggagaacgtggatgcggatcgacgggcaatgccattgcggggccgtgacctatcaagccgagatcgatcccgaacgggtgtcgatctgccactgcacggattgccaggcgctgaccggctcgccttatcgcgtcacggtgatctgtgctgccgagcaggtccggctgacccatggcgcgccgaaagtgtacggcaaacgcggcgataacggccgggtccgcttccagcatttttgcggcgattgcggttcccccttgttcacgagcggcgagcacggcggacccgacgactggggcatccgttggggcagcattcgccagcgcggcgaattgaccccgcgacgccaggtctggtgccgctccgccgccccctgggtcaatgatctcagcggattgccgacgcggcccaaggagtgaagctgacggattggggttttgcgaccttgcgcctcgggggtaggcgaggctaaagaggcgcgcaggtaagggcggctagctcagctggttagagcatctcgtttacaccgagagggtcgggagttcgaatctctcgccgcctaccagccttcgcacctcacgggctacggctgggcaagccagcctttgtggatgcaattgccgcttgcgcagtggcgcagggcgaaggcggactcgatcggcaactctcagacgaagcctgttcaggcttttccgatggggtagggaattcgccggcgctccagacagaacggatccggtcctatggttgaagcatcctgattgtcgagatcggccacttcccgatgtgccctgcgatcgagacgcgcaacccgtgcgactcgtccagaaacacgccttcgacagttcccgcagtcccgtcggtgagaactgcagcccttccgaccagttcggcctccgcttgcacatgctcgcgcaggatgatggtggcgcggcgtttcacgaactgcaaagcggcctctggttgaagagccttacgtagcaaggccattgcgcagccctctgtgagcgcgttgagagtgcgcgatcccgaccgtggggcagtagatggggtggccgggaccgcgcttgctccgcgctggctggtcaaatgtcattcgttggccgatggcgcgaaaggtgccgaaagtcacgtgcgcgggtttgatgccggccttgctgcgatgctattctcttcgcctaacctgggaacttgatgcatgcgcaaaatcgccgcgatcctactcctcaccatgattggcggacctgcactggcgcaatcggaccatgttccgcgctatcgcgaagaggtcgagaagtcgccggccgatgcagccaatgaggcgcggcagcagcgcgcctatcagcgcgcgctgagcggtgtgccggaccggaagccgaccgacccctggggtattgcgcgccccaatgacggccaggacgctgccaaggcgaatgccaccaagacaaagccagccaaacccacgaacgcagccgccaaatagccagcgagcgcggaccaggtcgatgaaatactacgtctgcagattgaccggaccgcgtccgacttttccgcaagacatgacgccgcaggaagccgccatcatgcaggcgcacgtcgcctattgcggcgaattgctgcaggccggcaaggcgctgatcttcgggccggtcgcagatcccggaggcgtctggggattgggcgtgctgcaactctccgatgatgccgatccgcaggagatcgtcgccaacgatcccgtcaccaaggccaacgccggattcacctatcaggtcacgcccatgttgcgcgccgcgacgcgtgagacctgctaaggcatgatccggaaaagtgcgaagcggttttccgacaaagatcatgcccgaacacgagacacgagacgctttctcaacaaggttggatcgcatgaacgcaggccatccgcagaacgccgatcagattgcatattggaacgggccgggtggtcagcgctgggcctcgcgacaggccgcgcaggacatcgtgctgcagccggtgctcgacctgctgatcgatcgcgccgcgccgaaggccggcgaacgcgtcgtcgatgtcggttgcggcagcggcgcttcgagttttgcgctggcggcaaaggtcgtgcccgcgggccacgtgctcggcgtcgatgtctccgggccgatgctgacgcgggcgcggcagagtgcgccgcagggattgccggtcgaattcgcgcttgccgacgcgaccgtctatccgttcgcccgcgagagttttgatctgctggcctcgcgcttcggcgtgatgttctttgccgatccggtggcgtcgttcaccaatttgcgcagagcgatgcggaagagtggccggctcgccttcgcctgctggcaggagccgcgcgaaaacccgttcttcatggcgccgctgcaggcggtctacaagcacgtgccgaagctgccgcagctcggccccgaggatcccggcccgttttcgtttgcttccgaagcccgggtgaagcgcatcctgggcgaagccggtttctccggcatcgctatggagccggtcaaggtcgagctcgatgtcgcaaccggccgcggcatcgatgcggcgatccagggcgcgctcaagatcggtccggccagccgtgcgctggaggggcatccggaagaggtgcgcgccgccgcgatcgcatcgatgcgcgaagcgttggcgccgttcgcgaagggtgattccgtgccgctgccgggcgcgatctggatcgtgactgcgcgggcttcctaaagcgttggccagctacttgagttgagcgcggcacgcagggctgaggtggcgcttgttccgctccatgcacgccgtgatatgcctgacgttcggaatgaattcgcggcagagcctcatagcgtccgcccggcaggccctgcgttgttcagccgtgcccgaattcgcatgcgcgctttcagcgagggccgaaaaggcgagtgctgcgagcagcgtgatcgcggcggccttgggtcgaccgatgttccggttggtctcgcaggcactttgcatgaccgtcgtatcctctgctgtcggcctcgccgaagtgctttgatcgtgcggttgatgcgctgagccgggtggtcgcaggatctacgcccgctgttcccagatcatcgccagatgcacgatggtctgcacggccttctccatgtcctggcggctgacccattcgagccgcgaatggaacgcgtgctcgccggcgaagatattcgggcagggcaatcccatgaaggacagccgcgaaccgtcggtgccgccacggatcgaggtcctgaccggcgtcagtcccgcgcgctcgatcgcctcgatcgcgtaggcgacgatctgcgggtgacggtcgatcacctccttcatgtttcggtactgctgtttgacttccatgcgataggtcgagcgcggatatcccttcatgacatccttcacgatcgtctcgagcagcgctcccttctgcttcaagccggcctcggtgaagtcgcgcacgatgaagtcgatccgcgcgttctcgagcgcgccagagattgcaaccggatgcagaaagccttccttgccctccgtggtctcgggcgagcaggtgtccttgggcaggcgatcgacgatcgcagccgcgatcttgatcgcgtgctccatcttgcccttcgcaaaacccggatgggtcgcgacgccttcgatgatgacgctggcgccgtcggcggagaaggtctcgtcctcgatatgaccggcggtctcgccgtccatggtgtagccgaaatcggcggcgagcttcttgatgtcgaccttgtcgacgccgcggccgatttcctcgtcgggcgtgaacaggatcttgatggtgccgtgcttcacctgcgggttggagacgaggaaatgcgcggcgtccatgatctcggcgaggccggccttgttgtcggcaccgagcagggtggtaccgtcggtcgtgatgatgtcattgccgatctgatcggcgagcgcttcgtgctcggcggcgcggatcacctgggtggagtcagcgggcaacacgatgtcgccgccgcgatagttcttcacgacctgcggcttgacgttcttgccggtgcagtcgggtgaggtgtccatgtgggagcagaagcagatcaccggcaccgtcttgtcagtgttggccgggatcgtcgcatagacgtagccgtgcggatcgagatgcgcgtcggcgatgcccatcgcctgcaattcggtgaccagcaggcggccaagatttttctgcttctcggtcgaagggcaggtcggcgaatccggatcggactgggtatcgatcacgacatagcgcaggaaacgctcggtgacggtgtgcttgaagtcgagggccggtgccagcatgaagaccacgcaaaggtacgggacagggataaggcgctcaggcgaaattggttcgcgcaagcaaagcgcatcaggcggcggctcgacaacagaaaagcgccattccggggccgcgtcgcgagccggaatggcgcctgatatcgaccaggccagaagctctagacggcttccttgagctccttggcggcgcggaaggcgaccttcttgctggccttgatgtggatctgctcgccggtcgcggggttgcggcccatgcgggcggcgcgcttgcggacctggaggatgccgaggccgacgatgcggatccgctcgcccttcttgaggtgcttggtgatccgggtgaccatgtcggtcaggatcgcctcggcctgcttcttggacagctcctgctcttcggcgatggccgccgccagatgcttcagcgtgatcgtcgccggggtcgctgctttcttcgccatgtctggccctcctcgttgctgaatggctggattgctgcttttcacgcgaatggcgcgccgttcgcgtcgggaaagtttgcccggtaaagtcctgaaaccgccggttctgggaacgggcagcgccgggccggccacaggaaacccagacctatcaggccttatttgattcggggctttgctgacaccaccgtttcgcctgaaaacaggctacaactcgcagccgtggcgcgaaagcgcctgcgctgtgcagggatccgcaacgtgcttgactatcgggatgcgggcctttatgccctcggtcctgcgcggatcaatccggtgaccggcatccgcgggagtagctcagttggttagagcgccgccctgtcacggcggaggccgcgggttcgagtcccgtctctcgcgccagtcttatcaagcacttagcaccaagttcgaggtttgagcgtgtcagacgaggcgccgtcatgacgggtccttggacggcgcttgtccggacctgccgacgctccccgtcaggcaatctcaaccgccggttcattcccagcgatcgcctgatcatcattcacgcacgcaatccggcattccgccacgccagacacgatcagccacgtctgcggcttcgcaccttctccgatgacgaccgttgcgtcctgatccgggagcgcttgcagtacgtggacgagcttgcggactgtcatcgatatgcttcctggaggcagcctggtcggggcgtgcgctcacgcgagcatcagatttgataacgcggcggtgacgatcgccgctcaggccagcgagaaagcgcaaatcatgcaggcctcggtttatttgcgcagcggagcgcgccagcctgacgtcgacctgacttcgtccgcgcgtgctcgcggttcctcgcgtgttccggaatgcacgcgcttgatgtgtcccaaagttgccggagatagcagagacagtctcggaaacatgtacatgcgcaaacgacactgcagcgcgcaagggccgacaaagcgaacctgacagggaggcttgcggatggattggagcctgtggctgaacgagtattacaaagacgaactggcaaggacggaagccgcgtgcgtaaggggagagcccgcgtacgacgcattcaaatggatcgatgatccctatctttggaatgtgttgctctggaaagagtatgatggcttcgacgccatcaaggccgctattcctgatccgcctgatgccgggacgcagaaaaactggagcggtcgttccggcatggaactaggggccgcggtgatcgaaacctatcgcctcatgcacgacaagctcaggctgcatctggacaagccattcgaagagcgttcggtgctggactatggttgcggctggggcagtgtgctcagatatttcatgaaggacgtgccgctgcgcaatttgcacggctgcgatccccacaagggcatcgtccaggtcgcgcagcgctccaaccctcgcgccgatatcgtgctgtcggacagcctgccgaaacgtcttccgttcaaccagaagttcgatgtcgcttacgccctgtcgatctggacgcatctctccccggtcgcaagcgacgtatgcctcgccgcagtccacgctgcgctggaggatcgcggccttttccttctgacggtgcggccgccggcttatgcattctatgagccgatctccaaattacccggctgggatcagcagaaaatctccgagaccctgcggcgagacggcttctacttctatccccaaagctatccggtcgacggcgagatgacatatggcgagacgatcatcaccaagcagtacatcgaagagcactggactgatcggttcgacattgtcgacgtcggcatgaacgggatctcgccctatcagagcattatcgttctccgaaagaaggcaaggccacattgatcgggccgcccgcgcgcaggcgctgtctcttgcgcgcccgccacgcagcggccgggcgcgcaagatcaggacgccgcaaggccgacgacgccgacctgctcggcggcatgcgcgggtctgctggatagttccgcgcgctgctccggcgtcagccaccacaacaggaacagcaccgcgatcccgttggacacgagaccggtcgtcagcggcacgttcatgatcgtctgaacggcgatgccggacgacacggcgatgaagcgcggcgacaaatgccgcgagaccgccgaccccaccgacaggatcaggccgcacaccagcgccgaaaccggagcgagcacgagaccgaccgacgcgataccctcggtggcgaggaaggacgcgttgaaattgccgtcgtgatagatggctccgagcgccgggccgagttcgccgtaggggcaggtggtcaccggccgaaggaccgatatctggcagaaccgcgtcaattcgcggtgcgcaaaaaagtcggcgtattgatcaagcgccagtgacgggatcgcgaggaagcgcagattgatggcgctgaacacgacgtagtccttgtcggcggtgagaacggcgaacgatgtcagtccgacgatggtagggagcaggactgcgagcacggtggccagccgcgggttgaaccggccgtagagccagaacagaaacggcagccagatcggcagcagcaggaccgtcttgttgttgacgacgggatagaaacaaagcgcaaacagcaaaacaccggcagccagcagcgattgcctgcgcgatgcgaaatgcacgaacagatagggcagcaccgctccgatcatgatcccggtgagatagttcagcagcgccggccgcgcgatggcgttacgggccgtgccgtaaggactgccgagcttgaccccgtacgagatgtcggcgagcagcacggcgaaagacgacaccagcagaagcagcgcgacgcctttgacggtcgtttccgacaggctgggccgccaaaccggcatgttctggaacatcagcggggtgatcgcggcggccagcgccgcgatcatggcccagcgggcgatcgcgtgcgggtagtcgaacgcgctgaagtggctgagccagacgaagccgaacacggctgacagcagcgagaagctcaccacataaccgaagctgaaccgtcccgcggcgaatgccgggatgaacaccgccatgacggcggtgccgatgatcgcctcggtggtgatgccggattgccagacatgcatccccgggaacgcgtgcccgcaggcgatcagcgaggcggtgctgacggcgaagaactcgaggatcgtgcccccgacaaccaggtcatcgcgcgtcattgcatcggcccgtccgaatcgagagctgtgcggcagctagccagccgaccccgatcgaatcaagtcaagcaacgttgagcgacgttccggtcggtcaccgcggcgccgcattgaacgcgcaatcggcaacaggctgccccgatcaggcaaagaatgcggcaaccgcgttcaggtcggtttgtcccggcgcctcgccgcgcaaattcgcgtcgatgatgcggcggcaggcgtcaaccgtgcttgtatcgcccaattcgttggcggcctcgaggatcgaccagaccgtatccaaggggatgtcgttctgcatggtcgcgttcgggtctgacagcatcggcggtgccggggttagaattcgaacagatcgcggccgcgccgcgccagggtgtgcagatccgccaccgtaccgcgcacagcgttgcagcggcggcattcgatgatggtgtcgccggacgcgttcgccggatcggcgatcttgatcgccaggctgccgcaatcggtgcagatgatcttgaagccggtcgaaattactcgctgctgcaaattcatgttgggcccgcgcctctgttgacgcccaccttaaggaacattttttaagacgggggtcgcggagcggatcgcaatcgaatgaccgcgttaggacgcggttaagattccgcggcggccgcgcgatccggcagatgcagcgtcggcttgccgagcgaggcgacggcggcgcgcagggcttcgcctgtatttgcaccttgcacacgtcgatatcgcgtgcctgcttctgcaatcgcggtacccgaagcaggcggcaaaggccgcaccgtcgtgatcggaactcgagatgatcatgcccaacaaaaaagccgcccaagggcggccgctttgtctgccgaaacttgaaaattctagcggaccgtcgaggtgcccgaggaggtgatcgcgaccggcttgccggccttgatgacctggttggtctgggcggtctgggtgaaatccgcgttgttccgcgccgaaatgccgaacgccgcaactccgatggccgcaacgagggcaaccaccacgatcttgaggtgggtcgcgcgatcagctgaatggatcgagtggttcatggtcgcctccgggcgtctatgcgccgtccatggcaggtactggtaagcccgatctgtttccggatcgtttcgtgagttccttgaaatggtttcatgccacgggcggattggtttcacggtgccttgcgtcacacaggcggaggatcgaaactgaccccaggcgcgggatgcgctcgggagaaaaacaataatgaaaacaacgaaaataagccgtcgccgggtgctgggcgccggctctgtggcaatggctgcgacgatgtttggtaagccggtccttgccgcggccgagttcgacttcaagcttggcgtcaacactccggaaacccacccgctaacaatccgtctggccgaggctgccaaggcggccggcgcgcagtcgggcggccggctcaacattacggtgtttgccaacagccaacttggcggtgacccggagatgctgtcgcaggtccgcgccggcggtatcgaactgttggccgcacccagcatgacgctgtcgacgctggtgccactgtccggtctgcccagcatcggtttcgccttccaatcctacgaccaggtctgggcggcgatggacggcggtgtcggcgacctcgtccgggatgcgatcgtcaagaccggcgtcgtgccgctgaagaaggtctgggacaacggcttccgccagatcacctcgtcgtcgagccggcagctcaacagcgtcgacgatctcaagggcttcaagattcgcgtgccggtgacggcacttctgacctcgctgttctcggggctcggtgcgctgccgtcgagcatctcctacagcgagctctattcggcgctgcagacccacatcgtcgaagggcaggagaatccactggcgcaggtctcgaccggaaagctctacgaggtacagaaatactgcgcgctgtcgaaccattgctggagcggctactggatcctcggcaaccgccgcgcgatagcgagcctgccgcccgatctgctcgagctcgtcaacaccgcgttcgacgcggcggcggtgaaggagcgcactgatctggtcgagatggaccgttcgctgcaggccgagctgaccgggaagggcatgatcttcaacaagccagatccggtgcagttcagagccgcgctggtgaaggccggcttctacacgcaatggcagaagacctatggcgcggatgcctgggcggcgctggagaagtatacgggcaagctgacgtaagggcgcgcaggttgccagcagcaatgcgccagtcgatcgcgctggcaacgcgaggcacgatcggcaggcttgcgcaggtatcctgacaacgtctcacacgacctgtcgcgctggcgcggggaagtgtgggggacatcatgttgtgatgcaaaaagcacaccgtcgcgctttcggttccattttcgctttttgtcgtgcggcaggatgtctcaggggatacaacctcacgctgagatttttagtggccgtgctacgcgcgacccgagtttggaatgccatgcacgtgcacgttgtggaacgcttccgattctcatgtttgcaacgggttgccgtaatcctcgctctgctcgtcgcgttcgggactggcgcacacgcccaaacggtgctgaacgccggcgatggtgcgagcctcgtcactgcgctgacgacgatcgataacaatccgggcgccagctacacgctcaacatcacgcagaacatcacgctgacgagcgggacaacgctgcccatcatcaattcgaggggcactgtcacgatcaacggcggcaacttcacgctcgatggcggcggcgtgcagcgcgggctcttcgtttactcgggtaccgtcgcggtcaacaatctgacgatccagaacgccgtggccaagggcggtaatggcggcagcgggttcgatggcggtggtggcggcggcatgggagccggtggcgcgctgttcgtagccagcggcgccagcgtcacggtgagcaatgtttcgctcgccagcaatcaggccaatggcggcagcggcggcagttacggctcgaccgggtcgggcggcggaggtggcggcgggctcggcggaaatggcggaagtggcggtaatgtcggtgctggcggcggcggcggaattggcctgggcgccaatggcggggccggcggggcgagcaccacgggtggcaatggcgcggccggcatcgccgttggcgccgctggcggcggcgccggcggcggcgacggcgccacggcaggtacgggtggcgcc
